(19) United States
(12) Patent Application Publication
(10) Pub. No.: US 2015/0296758 A1
(43) Pub. Date: Oct. 22, 2015

(54) HUMANIZED TRANSGENIC SINGLE NUCLEOTIDE POLYMORPHISM ANIMAL SYSTEMS

(71) Applicant: THE JOHNS HOPKINS UNIVERSITY, Baltimore, MD (US)

(72) Inventor: Jay Bream, Timonium, MD (US)

(21) Appl. No.: 14/648,011

(22) PCT Filed: Dec. 3, 2013
(86) PCT No.: PCT/US2013/072776

§ 371 Date: May 28, 2015

Related U.S. Application Data
(60) Provisional application No. 61/732,557, filed on Dec. 3, 2012.

(51) Int. Cl. A01K 67/027; C12N 9/02; C07K 14/715; C07K 14/54; C07K 14/705; C12N 9/04; C12N 9/80

(52) U.S. Cl. CPC A01K 67/0278; C12N 9/0006; C12N 9/0073; C12N 9/80; C07K 14/5428; C07K 14/54; C07K 14/70596; C07K 14/7151; A01K 2267/0368; A01K 2227/105; A01K 2227/101; A01K 2227/103; A01K 2227/30; A01K 2227/108; A01K 2227/40; A01K 2217/056; C12Y 101/04001; C12Y 305/01098

(57) ABSTRACT

The present invention relates to the field of transgenic animals. More specifically, the present invention provides methods and composition related to humanized transgenic single polymorphism non-human animal systems. In one embodiment, a system comprises (a) a transgenic non-human animal comprising a transgene encoding a wildtype human protein, wherein the protein is biologically active in the animal; and (b) at least one transgenic non-human animal comprising a transgene encoding a variant human protein, wherein the protein is biologically active in the animal and wherein the variant comprises one or more single nucleotide polymorphisms (SNPs).

### CROSS-REFERENCE TO RELATED APPLICATIONS

[0001] This application claims the benefit of U.S. Provisional Application No. 61/732,557, filed Dec. 3, 2012, which is incorporated herein by reference in its entirety.

### STATEMENT OF GOVERNMENTAL INTEREST

[0002] This invention was made with U.S. government support under grant no. R01 AI070594. The U.S. government has certain rights in the invention.

### FIELD OF THE INVENTION

[0003] The present invention relates to the field of transgenic animals. More specifically, the present invention provides methods and composition related to humanized transgenic single polymorphism mouse systems.

### INCORPORATION-BY-REFERENCE OF MATERIAL SUBMITTED ELECTRONICALLY

[0004] This application contains a sequence listing. It has been submitted electronically via EFS-Web as an ASCII text file entitled “P12089-02_ST25.txt.” The sequence listing is 711,783 bytes in size, and was created on Dec. 3, 2013. It is hereby incorporated by reference in its entirety.

### BACKGROUND OF THE INVENTION

[0005] In microorganisms, selective pressure, provided by antibiotics for example, results in the emergence of new strains that have been selected for based on natural genetic mutations that provide a survival advantage (i.e., drug-resistant strains). The same is true in higher organisms exposed to infectious microorganisms, and the net result of these natural evolutionary processes has been the development of host genetic diversity that is evidenced by differential disease susceptibility in human populations. Human genetic variation does not only impact disease risk, but also has a profound influence on vaccine efficacy and how individuals respond to medication. Collectively, this has spurred enormous growth in the relatively new field of pharmacogenomics, which is defined as the study of how genetic variability in human populations impacts on an individual's response to medicines. Often, this can be traced to the expression of genes in target pathways. In recent years, many groups in academia and industry have made efforts to exploit the in vivo capabilities of mouse models to understand how human genes are regulated by utilizing transgenic approaches to introduce human DNA into mice. Although this method can offer valuable insight into the basic molecular mechanisms that govern gene expression, it has some limitations. First, transgenic systems do not account for the influence of genetic variation on gene regulation at a given loci. Secondly, reporter genes are generally used to monitor gene activity and are therefore not biologically active. These factors limit the ability to study the downstream biological effects of gene induction on the intact animal.

[0006] Thus, there are very few current models that can address both of these important issues which would be of great value to academia, biotech, and the pharmaceutical industry as such models would permit the in vivo evaluation of human gene expression and function in response to infectious microorganisms, vaccines, and experimental therapies.

### SUMMARY OF THE INVENTION

[0007] The present invention is based, at least in part, on the development of a transgenic non-human animal system that permits the in vivo evaluation of human gene expression and function in response to infectious microorganisms, vaccine and experimental therapies. The present invention addresses the limitations of current approaches described above and provides great value to academia, as well as the biotech and pharmaceutical industries.

[0008] The transgenic non-human animal system of the present invention was developed using the human IL-10 gene. Because IL-10 is linked to numerous autoimmune and infectious diseases, and cancers, and there are well-characterized IL-10-dependent models of such diseases (i.e., colitis, toxoplasmosis, leishmaniasis, sepsis, multiple sclerosis, etc.), the transgenic system of the present invention offers an ideal in vivo model for pre-clinical testing of drug candidates targeting (human) IL-10 in general but can also be used to investigate pharmacogenomic dynamics of therapeutics based on different human IL10 alleles. Indeed, the present invention permits the evaluation of pharmacogenomic influence of therapeutics or vaccines on human gene expression and influence on disease outcomes in intact animals ideally for a clear in vivo model system for pre-clinical evaluation of therapeutics which target (human) IL-10.

[0009] Although the instant application is described in the context of IL-10, the present invention is not so limited. Other DNA modifications are possible to include other known DNA haplotypes in this locus. More generally, this technique could be applied to include other BACs which would include another human gene of interest, all genomic regulatory regions, and a functional gene product which would be the basis for future BAC lines generated of the same length but with a different genetic haplotype. In a broader sense, this approach represents an alternative to current attempts to generate “humanized” mice. Indeed, the present invention represents a powerful research tool for academia and industry, particularly given the ability to evaluate the role of different human genetic haplotypes on gene expression and disease outcomes in vivo.

[0010] Accordingly, in one aspect, the present invention provides systems of transgenic non-human animals. In one embodiment, a system comprises (a) a transgenic non-human animal comprising a transgene encoding a wildtype human protein, wherein the protein is biologically active in the animal; and (b) at least one transgenic non-human animal comprising a transgene encoding a variant human protein, wherein the protein is biologically active in the animal and wherein the variant comprises one or more single nucleotide polymorphisms (SNPs). In alternative embodiments, the variant human protein can comprise an insertion or a deletion. Indeed, it is contemplated that the variant human protein comprises a mutation relative to the wildtype or reference version. In other embodiments, the variant human protein can comprise a combination of SNPs, insertions and/or deletions. In particular embodiments, the transgenic non-human animal is murine, bovine, ovine, porcine, avian or piscine. In other specific embodiments, the human protein is a cytokine, cytokine receptor, TNF receptor, drug metabolizing enzyme, inflammatory protein or chromatin/DNA modifying protein. The term “wildtype” is used interchangeably with the term “reference.” For example, hIL10BAC-GCC (modified BAC) is compared to a reference genome for identification of variants. An example of a reference genome for IL-10 is shown in SEQ ID NO:3.

[0011] In certain embodiments, the transgene is a bacterial artificial chromosome (BAC) comprising a nucleotide sequence encoding the wildtype or variant human protein. In other embodiments, the transgene encoding the wildtype or variant human protein comprises the non-coding regulatory regions of the human protein. In further embodiments, the one or more SNPs are located in the promoter of the nucleotide sequence encoding the variant human protein.

[0012] In another embodiment, a system comprises (a) a transgenic non-human animal comprising a transgene encoding a wildtype human protein, wherein the protein is biologically active in the animal; and (b) at least one transgenic non-human animal comprising a transgene encoding a variant human protein, wherein the protein is biologically active in the animal and wherein the variant comprises one or more mutations. In certain embodiments, the one or more mutations can comprise one or more of SNPs, insertions, and/or deletions.

[0013] In a specific embodiment, a system comprises (a) a transgenic mouse comprising a transgene encoding a wildtype human protein, wherein the protein is biologically active in the animal; and (b) at least one transgenic mouse comprising a transgene encoding a variant human protein, wherein the protein is biologically active in the mouse and wherein the variant comprises one or more SNPs. The human protein can be a cytokine, cytokine receptor, TNF receptor, drug metabolizing enzyme, inflammatory gene or chromatin/DNA modifying gene. In a specific embodiment, the human protein is interleukin-10 (IL-10). In another specific embodiment, the transgene is a bacterial artificial chromosome (BAC) comprising a nucleotide sequence encoding the wildtype or variant human protein. In yet another embodiment, the transgene encoding the wildtype or variant human protein comprises the non-coding regulatory regions of the human protein. In certain embodiments, the one or more SNPs are located in the promoter of the nucleotide sequence encoding the variant human protein.

[0014] In another aspect, the present invention provides transgenic non-human animals. In one embodiment, a transgenic non-human animal comprises a transgene encoding a variant human interleukin-10 (IL-10), wherein the variant comprises one or more single nucleotide polymorphisms (SNPs). In particular embodiments, the animal is murine, bovine, ovine, porcine, avian or piscine. In certain embodiments, the transgene is a bacterial artificial chromosome (BAC) comprising a nucleotide sequence encoding a variant human IL-10, wherein the variant comprises one or more SNPs. In other embodiments, the one or more SNPs are located in the IL-10 promoter. In a specific embodiment, the SNP is one or more of rs12569132, rs11809840, rs11809303, rs11808255, rs11802425, rs11802412, rs11799787, rs11585685, rs11579735, rs11119451, rs11119449, rs10494878, rs7556267, rs7548373, rs7537619, rs7519318, rs7512090, rs7418268, rs6692511, rs6682675, rs6673928, rs6668464, rs6668374, rs6540587, rs6540586, rs6540582, rs4844553, rs4844552, rs4579758, rs4483409, and rs11807715. In alternative embodiments, the one or more SNPs are located in the IL-10 gene. In more specific embodiments, the SNP is one or more of rs3024496, rs3024491, rs3024490, rs3021094, rs2222202, rs1800896, rs1800894, rs1800893, rs1800891, rs1800872, rs1800871, rs1554286, rs1518111, and rs1518110.

[0015] In a further embodiment, BAC further comprises a nucleotide sequence encoding mitogen activated protein kinase-activated protein kinase 2 (MK2). In a specific embodiment, the nucleotide sequence encoding MK2 comprises one or more SNPs located in the MK2 promoter. In particular embodiments, the SNP is one or more of rs11119297, rs7410826, rs4240843, and rs4240842. In an alternative embodiment, the nucleotide sequence encoding MK2 comprises one or more SNPs located within the MK2 gene. In exemplary embodiments, the SNP is one or more of rs12564851, rs12404831, rs12060808, rs11809485, rs11582798, rs11119390, rs11119389, rs11119385, rs11119355, rs10863805, rs10863788, rs10863787, rs10863784, rs7530164, rs6669284, rs6540574, rs6540548, rs4845132, rs4845131, rs4539133, rs4325131, rs4274064, rs4256810, rs4240848, rs4240847, and rs4072677.

[0016] Furthermore, in certain embodiments, the BAC further comprises a nucleotide sequence encoding IL-19. In a specific embodiment, the nucleotide sequence encoding IL-19 comprises one or more SNPs located in the IL-19 promoter. In certain embodiments, the SNP is one or more of rs12565617, rs12563100, rs11805284, rs11805136, rs11583398, rs11583394, rs11583394, rs11119570, rs10494879, rs6702254, rs6667202, rs4845141, rs4845140, rs4845138, rs4845136, rs4845135, rs4845134, rs4072227, rs4072226, rs3122605, rs3001101, rs2945417, rs2015273, rs885334, rs11581469, rs11119515, and rs11119514.

[0017] In another embodiment, the nucleotide sequence encoding IL-19 comprises one or more SNPs within the IL-19 gene. In particular embodiments, the SNP is one or more of rs12409785, rs12409577, rs12409415, rs12408017, rs12407485, rs12407461, rs12040948, rs11811600, rs11811158, rs11802960, rs11799303, rs11119629, rs11119623, rs11119622, rs11119621, rs11119619, rs11119587, rs11119585, rs11119584, rs11119582, rs10863863, rs10863859, rs10746433, rs7529836, rs7518426, rs7513988, rs6685379, rs6663563, rs6660537, rs6660520, rs6540645, rs4845143, rs4440852, rs4347211, rs4240849, rs3950619, rs2883035, rs2352794, rs2243183, rs2243170, rs2243168, rs2243158, rs2243156, rs2056225, rs1878673, and rs1028182.

[0018] In a further embodiment, the BAC further comprises a nucleotide sequence encoding IL-20. In another embodiment, the nucleotide sequence encoding IL-20 comprises one or more SNPs located in the IL-20 promoter. In certain embodiments, the SNP is one or more of rs908704, rs908703, rs1798, rs1028182, rs7532642, rs7530109, rs11809303, rs11807894, rs11119726, rs10863890, rs10863889, rs7532642, rs3860299, rs1713233, rs1033272, rs570249, rs552760, and rs523435.

[0019] In another aspect, the present invention provides methods for screening agents. In a specific embodiment, a method for screening a candidate agent for the ability modulate IL-10 expression in the transgenic non-human animal of the present invention comprises the steps of (a) administering to a first transgenic non-human animal a candidate agent; and (b) comparing IL-10 expression in the first transgenic non-human animal to IL-10 expression of a second transgenic non-human animal of not administered the candidate agent, wherein a difference in the IL-10 expression in the first transgenic non-human animal administered the candidate agent compared to the second transgenic non-human animal not administered the candidate agent is indicative of a candidate agent that modulates IL-10 expression. In a specific embodiment, the transgenic non-human animal further comprises a disease model that is associated with IL-10. In another embodiment, a difference in disease severity is also compared. In other embodiments, the steps can be repeated using transgenic non-human animals that comprise a wildtype or reference human protein. The method can comprise repeating the steps with different transgenic non-human animals that express, for example, wildtype/reference protein and variants thereof.

[0020] Again, this example is not so limited to IL-10, as one skilled in the art can construct transgenic non-animal systems that express other genes that encode human proteins including, but not limited, cytokine genes, cytokine receptor gene(s), TNF receptor genes, drug metabolizing enzyme genes, inflammatory genes, HLA genes, cancer genes/oncogenes, autophagy genes, cell death genes, and chromatin/DNA modifying genes.

[0021] In another specific embodiment, the present invention provides a system comprising (a) hIL10BAC-ATA mice and (b) hIL10BAC-GCC mice. In a specific embodiment, the hIL10BAC-ATA mice comprise a BAC encoded by SEQ ID NO:1. In another specific embodiment, the hIL10BAC-GCC mice comprise a BAC encoded by SEQ ID NO:2. In a further embodiment, the system further comprises mice that comprise a transgene encoding a BAC comprising human wild type IL10 gene and regulatory regions. In yet another embodiment, a transgenic non-human animal comprises a transgene encoding a human protein known to influence disease susceptibility, wherein the protein is biologically active in the animal.

### BRIEF DESCRIPTION OF THE FIGURES

[0022] FIG. 1: Initial PCR analysis of BACs CTD-2563L3 and CTD-3174K1. Before carrying the DNA transplantation into execution PCR checks across the intended modification junctions were made. A) Schematic representation of the “donor” BAC CTD-2563L3 and the “acceptor” BAC CTD-3174K1. The position of three check PCR reactions on the BACs are given as red marks on the outer circles. Check primer pairs 1+2 and 4+5 amplify 5′ and 3′ flanking region of the “missing portion” (pink box). B) Analysis of PCR reactions by agarose gel electrophoresis. M: DNA size marker.

[0023] FIG. 2: Replacement of 30 kb downstream of the “missing portion”. A) Schematic representation of Red/ET mediated homologous recombination to replace a 30 kb segment of the donor BAC CTD-2563L3 by a 985 bp KanR cassette. 50 bp homology regions are given in red (cassette not to scale). B) Analysis of the replacement cassette by agarose gel electrophoresis. Using the primer pairs P344-PCR1-up×P344-PCR1-down (lane 1) on an appropriate gb2-KanR template the replacement cassette of 985 bp was generated. Samples were analyzed on a 1% (w/v) agarose gel. M: DNA size marker

[0024] FIG. 3: Flank check PCR after replacement of a 30 kb BAC section by a KanR cassette in CTD-2563L3. A) Map of CTD-2563L3-KanR. B) Schematic overview on the applied PCR strategy. C) Agarose gel electrophoresis of flank check PCRs on five clones derived from the recombination described in chapter 3. Using the primer pairs P344-check4×GBPR101 (5′ lanes) and GBPR75×GBPR61 (3′ lanes) on twelve putative recombinants (only five shown) integration of the KanR cassette was confirmed in all cases. Samples were analyzed on a 1% (w/v) agarose gel. M: DNA size marker.

[0025] FIG. 4: Subcloning of the “missing portion” into a low copy vector. A) Schematic representation of Red/ET mediated homologous recombination for subcloning of a 15.6 kb segment (“missing portion” plus KanR gene) from the truncated donor BAC CTD-2563L3-KanR into a linear minimal vector. 50 bp homology regions are given in red (not to scale). B) Analysis of the linear minimal vector by agarose gel electrophoresis. Using the primer pairs P344-PCR2-up×P344-PCR2-down (lane 1) on pACYC177 the minimal vector of 2141 bp was generated. Samples were analyzed on a 1% (w/v) agarose gel. M: DNA size marker.

[0026] FIG. 5: Restriction analysis of subclone “missing portion”. A) Map of the subclone. The “missing portion” of 12.6 kb is given in pink. Other elements: Kanamycin resistance gene (KanR): yellow; Ampicillin resistance gene (AmpR): red; p15A origin of replication: gold. Position of recognition sites of the three restriction enzymes PmeI, SacI, and BglII are indicated. B) Representative analysis of restriction digestion of the sucblone by agarose gel electrophoresis. Expected fragment sizes: lane 1-PmeI: 15.6 kb, 2049 bp; lane 2-SacI: 5481 bp, 4353 bp, 3555 bp, 1888 bp, 1601 bp, 642 bp, 183 bp (the last two fragment are not visible in the gel); lane 3-BglII: 6727 bp, 6480 bp, 3354 bp, 1142 bp. Samples were analyzed on a 1% (w/v) agarose gel. M: DNA size marker.

[0027] FIG. 6: Flank check PCR after insertion of the “missing portion” into BAC CTD-3174K1. A) Map of CTD-3174K1+12.6 kb. B) Schematic overview on the applied PCR strategy. C) Agarose gel electrophoresis of flank check PCRs on one clones derived from the recombination descried in the text. Using the primer pairs GBPR75×GBPR97 (5′ lane) and P344-check1×P344-check2 (3′ lane) on six putative recombinants (only one shown) integration of the missing portion was confirmed in all cases. Samples were analyzed on a 1% (w/v) agarose gel. M: DNA size marker.

[0028] FIG. 7. Diagram of BAC clones used for hIL10BAC lines and strategy for recombineering 12.6 Kb insert into parent GCC BAC to make hIL10BAC-GCC construct. HR-homologous recombination.

### DETAILED DESCRIPTION OF THE INVENTION

[0029] It is understood that the present invention is not limited to the particular methods and components, etc., described herein, as these may vary. It is also to be understood that the terminology used herein is used for the purpose of describing particular embodiments only, and is not intended to limit the scope of the present invention. It must be noted that as used herein and in the appended claims, the singular forms “a,” “an,” and “the” include the plural reference unless the context clearly dictates otherwise. Thus, for example, a reference to a “protein” is a reference to one or more proteins, and includes equivalents thereof known to those skilled in the art and so forth.

[0030] Unless defined otherwise, all technical and scientific terms used herein have the same meaning as commonly understood by one of ordinary skill in the art to which this invention belongs. Specific methods, devices, and materials are described, although any methods and materials similar or equivalent to those described herein can be used in the practice or testing of the present invention.

[0031] All publications cited herein are hereby incorporated by reference including all journal articles, books, manuals, published patent applications, and issued patents. In addition, the meaning of certain terms and phrases employed in the specification, examples, and appended claims are provided. The definitions are not meant to be limiting in nature and serve to provide a clearer understanding of certain aspects of the present invention.

[0032] It is widely appreciated that excessive immune activation results in an increased risk of disease morbidity and mortality. The anti-inflammatory cytokine IL-10 is a key regulator of inflammation by limiting excessive host responses to pathogens. In humans, hundreds of studies have described strong associations between IL-10 and risk for a wide array of infectious and autoimmune diseases. These associations are based primarily on IL-10 levels and/or SNP haplotype blocks in the IL10 promoter. In fact, IL-10 levels are linked with promoter SNPs and human IL-10 production can be stratified from low (“IL10ATA”) to high (“IL10GCC”) based on these IL10 promoter haplotypes. The indication that IL-10 production is determined on a genetic basis is supported by the concordance of IL-10 levels in monozygotic twins, which suggests that between 50 and 70% of IL-10 production is genetically determined. This is likely a common evolutionary mechanism to promote diversity in human gene expression and in response to selective pressures which has been noted in multiple human cytokine loci including IL10. Furthermore, our group and others have found that transcription factors differentially bind IL10 promoter SNPs suggesting a mechanism for allele-specific IL-10 expression. Altogether, these data suggest that the basis for how IL-10 influences susceptibility to disease in humans is due, at least in part, to differences in how IL-10 expression is controlled.

[0033] While mouse models have been extremely useful in describing the biologic properties of IL-10 and the distributions of IL-10-expressing cell types in tissues, they cannot account for inter- and intra-species differences in IL-10 gene regulation. Indeed, divergence in gene regulation patterns between species has been attributed largely to difficulties in translating some experimental findings in mice to humans. A key to overcoming this obstacle is to develop new tools to study hIL-10 and human immunology in general.

[0034] The present inventors established a novel system to model hIL-10 regulation using a transgenic bacterial artificial chromosome-based approach (hIL10BAC). This strategy is based on the fact that while differences in regulatory DNA sequences drive species-specific gene expression, the transcriptional machinery itself is highly conserved. Accordingly, the present inventors have verified that tissue-specific gene expression can be transferred across species to mice. Thus, the mouse gene regulatory machinery is able to decode human regulatory DNA sequences which drive cell- and species-specific gene expression. In addition, the hIL-10 protein functionally binds the mouse IL-10R, thus enabling the assessment of hIL-10 gene regulation and function using mouse models of human disease. The hIL10BAC is the first model which permits the in vivo assessment of inter-individual variation in human gene expression and the ensuing consequences on disease outcomes.

[0035] In mouse models, a growing body of evidence indicates that different cellular sources of IL-10 play distinctive roles in disease pathology. For example, myeloid-derived IL-10 confers protection to LPS challenge and IL-10-producing Th1 cells control susceptibility to several intracellular parasites. The cellular sources of IL-10 are challenging to characterize in humans due to wide inter-individual variation in hIL-10 expression and technical limits in obtaining tissue samples resulting in a limited understanding of hIL-10 regulation in different cell types in relation to disease outcomes. Still, the molecular mechanisms regulating IL-10 production in both humans and mice are not understood. The present invention directly addresses the molecular and genetic basis of how cell- and allele-specific hIL-10 expression controls disease outcomes.

[0036] Altogether, the work described herein builds on these data and expands the approach to understand how human IL-10 gene regulation programs in different cell types contribute to disease outcomes. The present inventors hypothesize that hIL-10 expression is determined by cell- and allele-specific regulatory elements in the IL10 locus. The work described herein was designed to clarify the molecular and genetic mechanisms which control the temporal/spatial expression of hIL-10. By identifying the cellular sources, tissue locations, and genetic factors that impinge on hIL-10 production, it is possible to design more targeted, personalized therapeutic strategies to manage inflammation by manipulating hIL-10 expression.

[0037] Using the hIL10BAC transgenic system, the present inventors are dissecting the complexities of hIL-10 regulation in vivo and the subsequent impact on immunopathology. The hIL10BAC approach is highly multidisciplinary, integrating concepts and experimental tools from several disciplines including immunology, human genetics, gene regulation and disease pathology. The hIL10BAC model provides an exclusive opportunity to examine the relationship between the temporal/spatial regulation of hIL-10 production and disease outcomes.

[0038] In addition, this strategy provides a more generalizable foundation for modeling human gene expression and function in vivo. This methodology can be applied more broadly to other disciplines and include practical applications (i.e., pre-clinical screening of drugs targeting human proteins or pathways which induce human proteins, etc.). For over 25 years, scientists have attempted to “humanize” mice by various methods with little success. The present inventors have developed a robust tool to experimentally link human gene expression with function by using human chromosomal DNA constructs with functional genes (as opposed to reporter genes or human genes under the control of mouse chromosomal DNA) that offers unique insights into human health.

[0039] Accordingly, in certain embodiments, the present invention could be of great use for pre-clinical evaluation of drug efficacy in vivo and in the context of disease. Indeed, the mice described herein can be used to study the effect of human IL-10 in numerous various mouse models of inflammatory diseases. In further embodiments, a similar strategy can be used to generate other transgenic mice with functional human genes under genomic control as described herein. In more particular embodiments, human genes that are known or likely targets for therapeutic intervention (based on their biologic function) are of particular interest.

[0040] The human IL-10 gene was selected for several reasons. First, IL-10 is associated with various autoimmune, infectious diseases and cancers in humans. Diseases are associated with single nucleotide polymorphisms (SNPs) in the IL10 promoter as well as levels of IL-10 protein production. Second, human IL-10 production is determined largely on a genetic basis. IL-10 promoter SNP haplotypes are associated with IL-10 protein levels (i.e., high vs. low IL-10). Third, mouse IL-10 expression and function is well-characterized. Fourth IL-10 deficiency in mice is associated with clear phenotypes which are mediated by tissue-specific expression of IL-10. Finally, human IL-10 protein is biologically active in the mouse and is easily distinguished.

[0041] The present inventors have generated new transgenic lines to address the role of SNPs on IL-10 conferring differential disease risk to inflammatory diseases. The present invention places the expression of functional human genes under genomic control in the context of different well-defined genotypes that are known to influence disease susceptibility and possibly drug efficacy. A system is now in place to determine the role of genetic variation in disease outcomes as well as response to therapeutics (for which this gene is frequently targeted) in a critical anti-inflammatory gene.

Human IL10 SNPs Affect Cell-Specific hIL-10 Production and Disease Outcomes.

[0042] Variations (such as SNPs) in non-coding regions of DNA that regulate gene expression are thought to be a driving force in evolution and individual differences in disease outcomes. Non-coding SNPs can impact gene expression and phenotypic variation by altering chromatin structure. Importantly, these variations affect gene expression by altering the binding of transcription factors to specific DNA motifs that has been documented between and within species.

[0043] SNPs in the human IL10 promoter are associated disease outcomes. The majority of gene association studies focus on a series of 3 SNPs in the proximal IL10 promoter consisting of −1082G/A (rs1800896), −819C/T (rs1800871), and −592C/A (rs1800872). These SNPs are in tight linkage disequilibrium which results in well-defined haplotypes including IL10ATA and IL10GCC. The IL10ATA and IL10GCC haplotypes are also associated with low and high IL-10 production respectively. Thus, the genetic control of IL-10 levels is thought to mediate disease risk. After carefully validating the hIL10BAC model we are now well-positioned to address this concept in vivo utilizing a new generation of hIL10BAC mice.

[0044] The BAC comprises one or more IL-10 SNPs. Known or unknown SNPs can be used. Known SNPs can be accessed via one of a number of publicly available databases including, but not limited to, the NCBI HAPMAP database. In specific embodiments, the SNPs are within the genomic area from chromosome 1 that was used to generate the hIL10BAC mice. In particular embodiments, a human IL-10 transgenic mouse can comprise one or more SNPs located upstream or downstream of one or more of the three genes in the BAC described herein, specifically, mitogen activated protein kinase-activated protein kinase 2 (Mapkapk2 or MK2), interleukin 10 (IL10 or IL-10), and interleukin 19 (IL19 or IL-19).

[0045] In certain embodiments, a human IL-10 transgenic mouse can comprise one or more SNPs located 5′ of the MK2 gene including, but not limited to, rs11119297, rs7410826, rs4240843, and rs4240842.

[0046] In other embodiments, a human IL-10 transgenic mouse comprises one or more SNPs located within the MK2 gene including, but not limited to, rs12564851, rs12404831, rs12060808, rs11809485, rs11582798, rs11119390, rs11119389, rs11119385, rs11119355, rs10863805, rs10863788, rs10863787, rs10863784, rs7530164, rs6669284, rs6540574, rs6540548, rs4845132, rs4845131, rs4539133, rs4325131, rs4274064, rs4256810, rs4240848, rs4240847, and rs4072677.

[0047] In further embodiments, embodiments, a human IL-10 transgenic mouse comprises one or more SNPs located 5′ of the IL-10 gene (3′ of MK2) including, but not limited to, rs12569132, rs11809840, rs11809303, rs11808255, rs11802425, rs11802412, rs11799787, rs11585685, rs11579735, rs11119451, rs11119449, rs10494878, rs7556267, rs7548373, rs7537619, rs7519318, rs7512090, rs7418268, rs6692511, rs6682675, rs6673928, rs6668464, rs6668374, rs6540587, rs6540586, rs6540582, rs4844553, rs4844552, rs4579758, rs4483409, and rs11807715.

[0048] In yet other embodiments, a human IL-10 transgenic mouse comprises one or more SNPs located within the IL-10 gene including, but not limited to, rs3024496, rs3024491, rs3024490, rs3021094, rs2222202, rs1800896, rs1800894, rs1800893, rs1800891, rs1800872, rs1800871, rs1554286, rs1518111, and rs1518110.

[0049] In specific embodiments, a human IL-10 transgenic mouse comprises one or more SNPs located 5′ of the IL-19 gene (3′ of IL-10) including, but not limited to, rs12565617, rs12563100, rs11805284, rs11805136, rs11583398, rs11583394, rs11583394, rs11119570, rs10494879, rs6702254, rs6667202, rs4845141, rs4845140, rs4845138, rs4845136, rs4845135, rs4845134, rs4072227, rs4072226, rs3122605, rs3001101, rs2945417, rs2015273, rs885334, rs11581469, rs11119515, and rs11119514.

[0050] In particular embodiments, a human IL-10 transgenic mouse comprises one or more SNPs located within the IL-19 gene including, but not limited to, rs12409785, rs12409577, rs12409415, rs12408017, rs12407485, rs12407461, rs12040948, rs11811600, rs11811158, rs11802960, rs11799303, rs11119629, rs11119623, rs11119622, rs11119621, rs11119619, rs11119587, rs11119585, rs11119584, rs11119582, rs10863863, rs10863859, rs10746433, rs7529836, rs7518426, rs7513988, rs6685379, rs6663563, rs6660537, rs6660520, rs6540645, rs4845143, rs4440852, rs4347211, rs4240849, rs3950619, rs2883035, rs2352794, rs2243183, rs2243170, rs2243168, rs2243158, rs2243156, rs2056225, rs1878673, and rs1028182.

[0051] In other embodiments, a human IL-10 transgenic mouse comprises one or more SNPs located 5′ of the IL-20 gene (3′ of IL-19) including, but not limited to, rs908704, rs908703, rs1798, rs1028182, rs7532642, rs7530109, rs11809303, rs11807894, rs11119726, rs10863890, rs10863889, rs7532642, rs3860299, rs1713233, rs1033272, rs570249, rs552760, and rs523435.

[0052] In particular embodiments, a hIL10BAC mice can comprise one or more SNPs including, but not limited to, rs11119297, rs7410826, rs4240843, rs4240842, rs12564851, rs12404831, rs12060808, rs11809485, rs11582798, rs11119390, rs11119389, rs11119385, rs11119355, rs10863805, rs10863788, rs10863787, rs10863784, rs7530164, rs6669284, rs6540574, rs6540548, rs4845132, rs4845131, rs4539133, rs4325131, rs4274064, rs4256810, rs4240848, rs4240847, rs4072677, rs12569132, rs11809840, rs11809303, rs11808255, rs11802425, rs11802412, rs11799787, rs11585685, rs11579735, rs11119451, rs11119449, rs10494878, rs7556267, rs7548373, rs7537619, rs7519318, rs7512090, rs7418268, rs6692511, rs6682675, rs6673928, rs6668464, rs6668374, rs6540587, rs6540586, rs6540582, rs4844553, rs4844552, rs4579758, rs4483409, rs11807715, rs3024496, rs3024491, rs3024490, rs3021094, rs2222202, rs1800896, rs1800894, rs1800893, rs1800891, rs1800872, rs1800871, rs1554286, rs1518111, rs1518110, rs12565617, rs12563100, rs11805284, rs11805136, rs11583398, rs11583394, rs11583394, rs11119570, rs10494879, rs6702254, rs6667202, rs4845141, rs4845140, rs4845138, rs4845136, rs4845135, rs4845134, rs4072227, rs4072226, rs3122605, rs3001101, rs2945417, rs2015273, rs885334, rs11581469, rs11119515, rs11119514, rs12409785, rs12409577, rs12409415, rs12408017, rs12407485, rs12407461, rs12040948, rs11811600, rs11811158, rs11802960, rs11799303, rs11119629, rs11119623, rs11119622, rs11119621, rs11119619, rs11119587, rs11119585, rs11119584, rs11119582, rs10863863, rs10863859, rs10746433, rs7529836, rs7518426, rs7513988, rs6685379, rs6663563, rs6660537, rs6660520, rs6540645, rs4845143, rs4440852, rs4347211, rs4240849, rs3950619, rs2883035, rs2352794, rs2243183, rs2243170, rs2243168, rs2243158, rs2243156, rs2056225, rs1878673, rs1028182, rs908704, rs908703, rs1798, rs1028182, rs7532642, rs7530109, rs11809303, rs11807894, rs11119726, rs10863890, rs10863889, rs7532642, rs3860299, rs1713233, rs1033272, rs570249, rs552760, and rs523435.

[0053] In particular embodiments, a hIL10BAC mice can comprise one or more SNPs selected from the group consisting of rs11119297, rs7410826, rs4240843, rs4240842, rs12564851, rs12404831, rs12060808, rs11809485, rs11582798, rs11119390, rs11119389, rs11119385, rs11119355, rs10863805, rs10863788, rs10863787, rs10863784, rs7530164, rs6669284, rs6540574, rs6540548, rs4845132, rs4845131, rs4539133, rs4325131, rs4274064, rs4256810, rs4240848, rs4240847, rs4072677, rs12569132, rs11809840, rs11809303, rs11808255, rs11802425, rs11802412, rs11799787, rs11585685, rs11579735, rs11119451, rs11119449, rs10494878, rs7556267, rs7548373, rs7537619, rs7519318, rs7512090, rs7418268, rs6692511, rs6682675, rs6673928, rs6668464, rs6668374, rs6540587, rs6540586, rs6540582, rs4844553, rs4844552, rs4579758, rs4483409, rs11807715, rs3024496, rs3024491, rs3024490, rs3021094, rs2222202, rs1800896, rs1800894, rs1800893, rs1800891, rs1800872, rs1800871, rs1554286, rs1518111, rs1518110, rs12565617, rs12563100, rs11805284, rs11805136, rs11583398, rs11583394, rs11583394, rs11119570, rs10494879, rs6702254, rs6667202, rs4845141, rs4845140, rs4845138, rs4845136, rs4845135, rs4845134, rs4072227, rs4072226, rs3122605, rs3001101, rs2945417, rs2015273, rs885334, rs11581469, rs11119515, rs11119514, rs12409785, rs12409577, rs12409415, rs12408017, rs12407485, rs12407461, rs12040948, rs11811600, rs11811158, rs11802960, rs11799303, rs11119629, rs11119623, rs11119622, rs11119621, rs11119619, rs11119587, rs11119585, rs11119584, rs11119582, rs10863863, rs10863859, rs10746433, rs7529836, rs7518426, rs7513988, rs6685379, rs6663563, rs6660537, rs6660520, rs6540645, rs4845143, rs4440852, rs4347211, rs4240849, rs3950619, rs2883035, rs2352794, rs2243183, rs2243170, rs2243168, rs2243158, rs2243156, rs2056225, rs1878673, rs1028182, rs908704, rs908703, rs1798, rs1028182, rs7532642, rs7530109, rs11809303, rs11807894, rs11119726, rs10863890, rs10863889, rs7532642, rs3860299, rs1713233, rs1033272, rs570249, rs552760, and rs523435.

### Transgenic Animal Systems Comprising Other Genes.

[0054] The methods and compositions of the present invention can be used to express virtually any other gene or genes of interest. For example, the present invention also includes transgenic animal systems that comprise one or more genes including, but not limited to cytokine genes, cytokine receptor gene(s), TNF receptor genes, drug metabolizing enzyme genes, inflammatory genes, HLA genes, cancer genes/oncogenes, autophagy genes, cell death genes, and chromatin/DNA modifying genes.

[0055] In certain embodiments, transgenic animal systems of the present invention can comprise one or more genes encoding cytokines including, without limitation, IL1B, IL2, IL4, IL5, IL6, IL7, IL8, IL9, IL11, IL-2A, IL12B, IL13, IL15, IL17A, IL17B, IL17C, IL17E, IL18, IL19, IL20, IL21, IL22, IL23, IL24, IL27 (EBI3), IL27-p28, IL28A, IL28B, IL29, IL31, IL32, IL33, IFNB, IFNG, TNFA, TGFB, LT, LIF, EPO, OSM, GCSF, GMCSF, PRO, TSLP, and EGF.

[0056] Transgenic animal systems of the present invention can also comprise one or more genes encoding cytokine receptors including, but not limited to, IL1R, IL1R2, IL1RAPL2, IL1RA, IL2R, IL3R, IL4R, IL6R, IL7R, IL8R, IL9R, IL10RA/B, IL11R, IL12R, Il13R, IL15R, IL17R (subunits A, B, C, D, E encoding for IL17R), IL18R, IL20R, IL21R, IL22R, IL22BP, IL23R, IL27R, IL28R, TGFBR 1-3, IFNAR1/2, IFNGR1/2, GP130, LIFR (CD118), OSMR, EPOR, GMCSFR (CD116), IL31R, EGFR, PR, and TSLPR. In certain embodiments, receptors (cytokine, TNF, etc.) are usually comprised of more than one chain (i.e., more than one gene encodes for a functional receptor). In such cases, the genes encoding the subunits can be introduced into one or more vectors. For example, the genes encoding the subunits of a receptor can be cloned into one BAC or as many BACs as there are subunit-encoding genes.

[0057] In further embodiments, transgenic animal systems of the present invention can comprise one or more genes encoding TNF receptors including, but not limited to, TNFRSF1A, TNFRSF1B, LTBR, TNFRSF4, CD40, FAS, TNFRSF6B, CD27, TNFRSF8, TNFRSF9, TNFRSF10A, TNFRSF10B, TNFRSF10C, TNFRSF10D, TNFRSF11A, TNFRSF11B, TNFRSF12A, TNFRSF13B, TNFRSF13C, TNFRSF14, NGFR, TNFRSF17, TNFRSF18, TNFRSF19, TNFRSF21, and TNFRSF25.

[0058] In certain embodiments, transgenic animals comprise one or more genes encoding drug metabolizing enzymes including, but not limited to, CYP1A1, CYP1A2, CYP1B1, CYP2A6, CYP2A13, CYP2A7, CYP2B6, CYP2C8, CYP2C9, CYP2C18, CYP2C19, CYP2D6, CYP2E1, CYP2F1, CYP2J2, CYP2R1, CYP2S1, CYP2U1, CYP2W1, CYP3A4, CYP3A5, CYP3A7, CYP3A43, CYP4A11, CYP4A22, CYP4B1, CYP4F2, CYP4F3, CYP4F8, CYP4F11, CYP4F12, CYP4F22, CYP4V2, CYP4X1, CYP4Z1, CYP5A1, CYP7A1, CYP7B1, CYP8A1, CYP8B1, CYP11A1, CYP11B1, CYP11B2, CYP17A1, CYP19A1, CYP20A1, CYP21A2, CYP24A1, CYP26A1, CYP26B1, CYP26C1, CYP27A1, CYP27B1, CYP27C1, CYP39A1, CYP46A1, CYP51A1, and VKORC1.

[0059] In other embodiments, the present invention can also be applied to express one or more chromatin/DNA modifying genes including, but not limited to, HDAC1, HDAC2, HDAC3, HDAC4, HDAC5, HDAC6, HDAC7, HDAC8, HDAC9, HDAC10, HDAC11, SIRT1, SIRT2, SIRT3, SIRT4, SIRT5, SIRT6, SIRT7, DNMT1, DNMT3A and, DNMT3B

[0060] One or more inflammatory genes can also be used in the context of the present invention including, but not limited to, MAPK14, ICAM1, ITGAL, ITGAM, ITGB1, ITGB2, NFKB1, NOS2, MAPK1, MAPK3, MAPK8, VCAM1, TLR1, TLR3, TLR4, TLR6, TLR7, TLR8, TLR9, IRAK2, MYD88, TRAF6, CD14, CXCR4, CRP, CCL2, NFKB1, CAMP, HMOX1, TREM1, PI3K, PIK3CA, PTEN, AKT1, AKT2, MTOR, JAK 1-3, TYK2, and CCR5.

[0061] Accordingly, in one aspect, the present invention provides systems of transgenic non-human animals. In one embodiment, a system comprises (a) a transgenic non-human animal comprising a transgene encoding a wildtype human protein, wherein the protein is biologically active in the animal; and (b) at least one transgenic non-human animal comprising a transgene encoding a variant human protein, wherein the protein is biologically active in the animal and wherein the variant comprises one or more single nucleotide polymorphisms (SNPs). In particular embodiments, the transgenic non-human animal is murine, bovine, ovine, porcine, avian or piscine. In other specific embodiments, the human protein is a cytokine, cytokine receptor, TNF receptor, drug metabolizing enzyme, inflammatory protein or chromatin/DNA modifying protein.

[0062] In certain embodiments, the transgene is a bacterial artificial chromosome (BAC) comprising a nucleotide sequence encoding the wildtype or variant human protein. In other embodiments, the transgene encoding the wildtype or variant human protein comprises the non-coding regulatory regions of the human protein. In further embodiments, the one or more SNPs are located in the promoter of the nucleotide sequence encoding the variant human protein.

[0063] In a specific embodiment, a system comprises (a) a transgenic mouse comprising a transgene encoding a wildtype human protein, wherein the protein is biologically active in the animal; and (b) at least one transgenic mouse comprising a transgene encoding a variant human protein, wherein the protein is biologically active in the mouse and wherein the variant comprises one or more SNPs. The human protein can be a cytokine, cytokine receptor, TNF receptor, drug metabolizing enzyme, inflammatory gene or chromatin/DNA modifying gene. In a specific embodiment, the human protein is interleukin-10 (IL-10). In another specific embodiment, the transgene is a bacterial artificial chromosome (BAC) comprising a nucleotide sequence encoding the wildtype or variant human protein. In yet another embodiment, the transgene encoding the wildtype or variant human protein comprises the non-coding regulatory regions of the human protein. In certain embodiments, the one or more SNPs are located in the promoter of the nucleotide sequence encoding the variant human protein.

[0064] Although the present invention is described in the context of using bacterial artificial chromosomes (BAC), any vector that allows the propagation of large DNA fragments can be used including, but not limited to, yeast artificial chromosomes (YAC) and phage artificial chromosomes (PAC). Indeed, the use of large genomic fragments, cloned as YACs, PACs and BACs can be used to generate the transgenic mice described herein.

[0065] In cases where it is unknown if the human gene(s) protein product(s) will functionally interact with endogenous mouse substrate(s), the capacity of the human protein(s) to function in mouse cells can be determined using in vitro experiments. The experimental approach to determine function will vary depending on the substrate. For example, if the human target protein(s) are a cell surface receptor, an appropriate experiment would be to stimulate human cells expressing the target human receptor with the orthologous mouse ligand (recombinant) and measure an expected outcome (i.e., phosphorylation of substrates downstream of the human receptor, induction of target genes, etc.). If it is determined that the human target protein(s) do not functionally interact with mouse substrates, an alternate strategy will employed to assure in vivo function.

[0066] More specifically, different approaches may be used to rebuild/replace biologically functional human components of endogenous mouse pathways. In the example used above, the human ligand/substrate for the target human gene(s) will be introduced into mice. This may be done by transgenesis, transduction of viral derived vectors, genome editing (i.e., nuclease-mediated), or by knock-in of the human gene coding regions into the homologous mouse locus. These genetic modifications may be combined at the time of oocyte injection. Oocytes from mouse strains other than C57BL/6 may be used to increase efficiency. One of ordinary skill in the art can assay the functionality of the human protein with the endogenous mouse substrate and, if necessary, rebuild/replace biologically functional human components of endogenous mouse pathway, with undue experimentation.

### EXAMPLES

[0067] The following examples are put forth so as to provide those of ordinary skill in the art with a complete disclosure and description of how the compounds, compositions, articles, devices, and/or methods described and claimed herein are made and evaluated, and are intended to be purely illustrative and are not intended to limit the scope of what the inventors regard as their invention. Efforts have been made to ensure accuracy with respect to numbers (e.g., amounts, temperature, etc.) but some errors and deviations should be accounted for herein. Unless indicated otherwise, parts are parts by weight, temperature is in degrees Celsius or is at ambient temperature, and pressure is at or near atmospheric. There are numerous variations and combinations of reaction conditions, e.g., component concentrations, desired solvents, solvent mixtures, temperatures, pressures and other reaction ranges and conditions that can be used to optimize the product purity and yield obtained from the described process. Only reasonable and routine experimentation will be required to optimize such process conditions.

### Example 1

### Construction of the original BAC (hIL10BAC-ATA)

[0068] We initiated a database search to identify a human bacterial artificial chromosome (BAC) derived from chromosome 1 in which the IL10 gene is situated approximately at the midpoint. The reason for this is to increase the likelihood that there would be a sufficient amount of genomic DNA surrounding the MO gene to reconstitute normal expression. Data from other BAC transgenic models suggest that a minimum of 50 kb of genomic sequence flanking a given gene is required to recapitulate normal expression. Heintz N. BAC to the future: the use of bac transgenic mice for neuroscience research. Nat Rev Neurosci 2001; 2:861-870. We identified a contig (accession number NT_{—}021877) that consisted of 16,682,800 bp of genomic sequence. Blast searches confirmed the presence of the human genes encoding MAPKAPK2, IL10, and IL19. A BAC clone (RP11-262N9) was identified to contain these genes within the genomic sequence available for contig NT_{—}021877, using NCBI's clone registry searches restricted to human chromosome 1 (http://www.ncbi.nlm.nih.gov/genome/cyto/hbrc.shtml). The location of the BAC was identified in contig NT_{—}021877 by end-sequence information for BAC clone-ID RP11-262N9 based on the accession numbers AQ481134 (SP6), and AQ481138 (T7). Blast searches with end-sequences allowed us to identify the exact size (181 kb) and location of the BAC on chromosome 1 (based on public database nomenclature for numbering chromosome 1: 203,246,000-203,427,000). The BAC clone RP11-262N9 was ordered from BAC PAC Resources (Oakland, Calif.) and was grown from a stab in 1 L of LB broth under chloramphenicol selection, and BAC DNA was isolated by cesium chloride gradient (Lofstrand Labs Limited, Gaithersurg, Md.). The sequence of the hIL10BAC-ATA construct is shown in SEQ ID NO:1. An example of a reference genome for NT_{—}021877 is shown in SEQ ID NO:3.

[0069] To release the BAC from the backbone vector (pBACe3.6), the DNA was subjected to NotI digestion. The purified BAC following NotI digestion was 175 kb in length. The BAC DNA was directly injected into fertilized oocytes of C57BL/6 mice. We chose C57BL/6 to eliminate the need to backcross from hybrid strains. See Bygrave A E, Rose K L, Cortes-Hernandez J et al. Spontaneous Autoimmunity in 129 and C57BL/6 Mice-Implications for Autoimmunity Described in Gene-Targeted Mice. PLoS Biology 2004; 2:e243; and McVicar D W, Winkler-Pickett R, Taylor L S et al. Aberrant DAP12 signaling in the 129 strain of mice: implications for the analysis of gene-targeted mice. J Immunol. 2002; 169:1721-1728 Ten of 100 founder mice screened positive for the transgene by Southern blot analysis. Of the 10 founders, 7 survived and were mated with wildtype (WT) C57BL/6 breeders to expand each colony.

### Example 2

### Construction of the New BAC (hIL10BAC-GCC)

[0070] We screened BAC libraries for clones containing the “GCC” haplotype in the IL10 locus and identified a particular clone (CTD-3174K1) that was very close in size to the original hIL10BAC, to create a new “GCC” strain. We generated a construct of the exact length of the original hIL10BAC construct to exclude any potential bias that could be introduced by differences in construct size and DNA content except for the SNPs carried by the different IL10 alleles. To replace the “missing 12.6Kb” of sequence in the “parent BAC” (CTD-3174K1), we identified a “donor BAC” that was from the same library which contained the IL10 promoter. It was important the donor BAC contained the IL10 promoter so that we could verify the GCC allele given that we did not know if the library was derived from an individual heterozygous at this locus. The experimental strategy used to create the GCC strain is illustrated in FIG. 7. In brief, the 12.6Kb fragment from the donor BAC contained the IL10 promoter so that we could verify the GCC allele given that we did not know if the library was derived from an individual heterozygous at this locus. The 12.6Kb fragment from the donor BAC clone (CTD-2563L3) was inserted in frame into the parent BAC by homologous recombination creating a full-length “modified parent BAC” hIL10BAC-GCC construct. The construct was liberated from cloning vector by NotI digestion. Additional genomic sequence 3′ to MAPKAPK2 was removed by an endogenous NotI site (which we confirmed to be free of SNPs). The same endogenous NotI site was used to create the original hIL10BAC construct. The sequence of the hIL10BAC-GCC construct is shown in SEQ ID NO:2.

### Fusion of a 12.6 kb DNA fragment to the 3′ end of BAC CTD-3174K1

[0071] Check on BACs.

[0072] In order to verify integrity, BACs CTD-2563L3 and CTD-3174K1 were subjected to PCR analysis with primers spanning the junctions of the planned modifications. The expected amplification products were obtained for all of the three reactions (FIG. 1).

[0073] Generation of the KanR Replacement Cassettes.

[0074] In the first stage of the project it was necessary to remove 31 kb of DNA spacing the “missing portion” from the BAC backbone in the donor BAC CTD-2563L3. For that purpose, a replacement cassette containing a Kanamycin resistance gene under control of the prokaryotic gb2 promoter was generated by PCR. This enabled positive selection on recombination events. Homology arms (50 bp) featuring sequence homologies to the regions adjacent to the DNA stretch to be deleted were introduced with the primers used for the cassette synthesis.

[0075] Generation of a Truncated CTD-2563L3 BAC Derivative.

[0076] The replacement cassette (985 pb) was gel-purified and electroporated into E. coli DH10B harboring BAC CTD-2563L3 and proficient for pRed/ETTet. Red/ET recombination was induced by adding L-Arabinose to the cultures and a temperature shift to 37° C., samples from which L-Arabinose was omitted were used as negative controls. After electroporation, cultures were plated on LB plates containing 15 μg/mL Chloramphenicol and 15 μg/mL Kanamycin. The next day the number of colonies was determined About 170 colonies were obtained. Twelve clones were randomly chosen for further testing. No growth was observed on negative control plates with cultures that were not induced by L-Arabinose.

[0077] Putative recombinants were subjected to PCR screening across the junctions of the KanR cassette. Correctly recombined clones showed up with a 530 bp and a 500 bp amplificate on the 5′ and the 3′ flank, respectively (FIG. 3). FIG. 3c shows five representative results.

[0078] Generation of a Linear Low Copy AmpR-Minimal Vector and Subcloning of the “Missing Portion” from BAC CTD-2563L3-KanR.

[0079] In the next stage of the project the “missing portion” together with the KanR gene was subcloned into a p15A based low copy minimal vector. For that purpose a linear minimal vector (2141 bp) was generated by PCR on pACYC177. Besides two terminal 50 bp homology arms these primers introduced PmeI recognition sites (FIG. 4a).

[0080] The minimal vector (2141 pb) was gel-purified and electroporated into E. coli DH10B harboring BAC CTD-2563L3-KanR and proficient for pRed/ETTet. Red/ET recombination was induced by adding L-Arabinose to the cultures and a temperature shift to 37° C., samples from which L-Arabinose was omitted were used as negative controls. After electroporation, cultures were plated on LB plates containing 50 μg/mL Ampicillin and 15 μg/mL Kanamycin. The next day the number of colonies was determined About 860 colonies were obtained. Twelve clones were randomly chosen for the preparation of small scale cultures and glycerol stocks, six of them for immediate further testing. The growth of seven colonies was observed on negative control plates with cultures that were not induced by L-Arabinose.

[0081] Six subclone candidates were subjected to restriction digestions with PmeI, SacI, and BglII (FIG. 5a). All these clones exhibited the same banding pattern, matching the in silico prediction perfectly. This is exemplified by showing only the restriction pattern of subclone number 1 (FIG. 5b).

[0082] The 15.6 kb fragment from FIG. 5b was eluted from the gel and directly used for the final recombination step. This was possible since the terminal sections of this DNA, except for the residual four nucleotides of the former PmeI recognition site, are homologue to the very end of the insert of the acceptor BAC CTD-3174K1, and the adjacent 5′ end of the BAC backbone, respectively.

[0083] Generation Integration of the “Missing Portion” Fragment into BAC CTD-3174K1.

[0084] The PmeI fragment (15.5 kb) was electroporated into E. coli DH10B harboring BAC CTD-3174K1 and proficient for pRed/ETTet. Red/ET recombination was induced by adding LArabinose to the cultures and a temperature shift to 37° C., samples from which L-Arabinose was omitted were used as negative controls. After electroporation, cultures were plated on LB plates containing 15 μg/mL Chloramphenicol and 15 μg/mL Kanamycin. The next day the number of colonies was determined About 150 colonies were obtained. Six clones were randomly chosen for the preparation of small scale cultures and glycerol stocks, six of them for immediate further testing. The growth of six colonies was observed on negative control plates with cultures that were not induced by L-Arabinose.

[0085] Six of the clones were tested in a flank check PCR (FIG. 6). All clones featured the same results (FIG. 6c shows a result representative for all six clones). Amplificates gained on three of the six tested clones were excised from the gel, eluted and subjected to sequencing reaction. That way the correctness of the integration was proofed (data not shown).

[0086] Finally, a pulse field gel electrophoresis was performed with XhoI, FspI, and NotI digestions of the original BAC CTD-3174K1 and the modified BAC CTD-3174K1+12.6 kb missing portion. This side-by-side analysis allowed the comparison of banding pattern of both BACs and with the in silico prediction (data not shown).

[0087] As can be seen from FIG. 6, the expected banding pattern was obtained for the two tested BACs. Together with the sequencing results from flank check PCRs it was demonstrated, that die BAC CTD-3174K1+12.6 kb missing portion meets the criteria for a final clone of this project.

[0088] In order to make sure the final clone is free of the pRed/ETTet plasmid, single colonies from a loop strike out of clone #4 were tested for their susceptibility to tetracycline. In all cases the tested candidates featured a Tet-sensitive (TetS) phenotype. The glycerol stock delivered to the customer is derived from a single TetS clone.

TABLE 1
hIL10BAC-GCC compared to reference genome for identification
of variants

| Chrom. | | | | |
|---|---|---|---|---|
| No. | POS | ID | REF | ALT |
| 1 | 206854506 | rs4240842 | A | T (replacement of the A |
| | | | | NT by the T NT) |
| 1 | 206854615 | rs4240843 | C | T |
| 1 | 206854886 | rs10625530 | G | GTCA (replacement of the |
| | | | | G NT by GTCA), and so on |
| 1 | 206858172 | . | T | C |
| 1 | 206864573 | rs6683282 | G | A |
| 1 | 206864849 | rs10863777 | T | C |
| 1 | 206864849 | . | T | TATATATATATATATATATAC |
| | | | | (SEQ ID NO: 14) |
| 1 | 206868266 | rs4539133 | A | G |
| 1 | 206868354 | rs4274064 | C | G |
| 1 | 206869116 | rs34268218 | TC | T |
| 1 | 206872487 | rs4845130 | G | A |
| 1 | 206873734 | rs17350838 | C | T |
| 1 | 206874251 | rs6540548 | A | G |
| 1 | 206875176 | rs72220714 | T | TAA |
| 1 | 206875514 | rs4240844 | C | T |
| 1 | 206875697 | rs4240845 | T | C |
| 1 | 206876797 | rs10863787 | C | G |
| 1 | 206876806 | rs10863788 | G | A |
| 1 | 206877337 | rs12060808 | C | T |
| 1 | 206879122 | rs4072677 | G | T |
| 1 | 206879458 | rs10605164 | CTTAT | C |
| 1 | 206884655 | rs6676599 | C | T |
| 1 | 206885839 | rs11119355 | T | G |
| 1 | 206886307 | . | T | TCACACA T TCACACACA |
| | | | | (SEQ ID NO: 15) The |
| | | | | underlined NTs are |
| | | | | added on both sides of |
| | | | | the reference NT “T.” |
| 1 | 206887042 | rs7530164 | T | C |
| 1 | 206888109 | rs34899945 | C | CA |
| 1 | 206889742 | rs4325131 | T | C |
| 1 | 206890435 | rs6669284 | G | A |
| 1 | 206890449 | rs4256810 | T | C |
| 1 | 206891877 | rs71570029 | CAAAAA | C |
| 1 | 206896255 | rs28394820 | T | C |
| 1 | 206896342 | rs4240846 | A | G |
| 1 | 206896622 | rs4240847 | C | A |
| 1 | 206896750 | rs4240848 | T | C |
| 1 | 206896876 | rs4845131 | G | T |
| 1 | 206897481 | rs4607880 | A | G |
| 1 | 206897727 | rs6540574 | G | A |
| 1 | 206897837 | rs4845132 | T | C |
| 1 | 206899052 | rs11119385 | A | G |
| 1 | 206900590 | rs11119389 | T | G |
| 1 | 206901367 | rs34647668 | GT | G |
| 1 | 206901382 | rs11119390 | C | G |
| 1 | 206904464 | rs10863805 | C | T |
| 1 | 206906625 | rs10610415 | ATGTG | A ATGTG ATG |
| | | | | The underlined NTs are |
| | | | | added on both sides of |
| | | | | the reference NT “ATGTG.” |
| 1 | 206906943 | . | T | C |
| 1 | 206912772 | rs144807922 | G | GTCC |
| 1 | 206913780 | rs3935632 | G | A |
| 1 | 206914016 | rs10863812 | T | C |
| 1 | 206915418 | rs4844552 | A | G |
| 1 | 206916362 | rs6540582 | C | T |
| 1 | 206917285 | rs72314394 | TTCTCTTTCTTTC | T TTCTCTTTCTTTCCTTCCT TTCCT |
| | | | CTTCCT | (SEQ ID NO: 17) |
| | | | (SEQ ID NO: 16) | |
| 1 | 206917326 | rs12138730 | C | T |
| 1 | 206917334 | rs71515110 | C | T |
| 1 | 206917338 | rs6668374 | C | T |
| 1 | 206917342 | rs12138733 | C | T |
| 1 | 206917400 | rs72371918 | CTCCTTCCTTCCT | C |
| | | | TCCTTCCT | |
| | | | (SEQ ID NO: 18) | |
| 1 | 206917421 | . | TC | T |
| 1 | 206917480 | rs61610737 | C | CT |
| 1 | 206918383 | rs4483409 | A | G |
| 1 | 206918855 | rs111264125 | T | TA |
| 1 | 206920546 | rs6540586 | A | G |
| 1 | 206920804 | . | CTA | C |
| 1 | 206920820 | rs67618268 | A | T |
| 1 | 206920822 | rs79580208 | A | T |
| 1 | 206923478 | rs11119447 | T | C |
| 1 | 206924226 | rs6540587 | C | T |
| 1 | 206924244 | rs72755097 | G | C |
| 1 | 206924289 | rs7536492 | G | A |
| 1 | 206924536 | rs11119449 | T | A |
| 1 | 206924662 | rs71846636 | A | AAC |
| 1 | 206925681 | rs11119451 | G | C |
| 1 | 206925844 | rs7556267 | T | C |
| 1 | 206925881 | rs13373997 | A | T |
| 1 | 206925893 | rs66488234 | C | T |
| 1 | 206925934 | rs67575336 | T | C |
| 1 | 206925977 | rs57859555 | T | C |
| 1 | 206926004 | rs146809685 | TTTCC | T |
| 1 | 206926846 | rs6658896 | T | C |
| 1 | 206927288 | . | C | CTT |
| 1 | 206927516 | rs6692511 | T | C |
| 1 | 206929182 | rs7418268 | T | G |
| 1 | 206930055 | rs6699203 | A | C |
| 1 | 206932418 | rs186924884 | T | C |
| 1 | 206932451 | rs4390174 | A | G |
| 1 | 206935483 | rs114952863 | G | A |
| 1 | 206936197 | rs138082438 | C | CTCCTTTCCTTTCCTTTCCTTTCCT |
| | | | | T C CCTT (SEQ ID NO: 19) |
| 1 | 206936262 | rs149127784 | C | T |
| 1 | 206936266 | rs5028660 | C | T |
| 1 | 206936266 | rs138438672 | C | CCTTTCTTT C CCTTCCTTTCTTT |
| | | | | (SEQ ID NO: 20) |
| 1 | 206936345 | rs72420444 | CTCTTTCTT | C |
| 1 | 206936432 | rs71152492 | C | CT |
| 1 | 206939904 | rs3024505 | G | A |
| 1 | 206940310 | rs3024502 | C | T |
| 1 | 206940766 | rs193120806 | G | C |
| 1 | 206940831 | rs3024500 | A | G |
| 1 | 206941864 | rs3024496 | A | G |
| 1 | 206942413 | rs3024495 | C | T |
| 1 | 206943351 | rs3024494 | T | C |
| 1 | 206943713 | rs1878672 | G | C |
| 1 | 206943968 | rs3024493 | C | A |
| 1 | 206944233 | rs1554286 | A | G |
| 1 | 206944645 | rs1518111 | T | C |
| 1 | 206944861 | rs1518110 | A | C |
| 1 | 206945046 | rs3024491 | C | A |
| 1 | 206945311 | rs3024490 | A | C |
| 1 | 206945381 | rs2222202 | G | A |
| 1 | 206946407 | rs1800872 | T | G |
| 1 | 206946634 | rs1800871 | A | G |
| 1 | 206946897 | rs1800896 | T | C |
| 1 | 206946931 | rs3980910 | T | TTGTGTGTGTGTG |
| | | | | (SEQ ID NO: 21) |
| 1 | 206947167 | rs1800893 | C | T |
| 1 | 206948553 | rs6693899 | G | T |
| 1 | 206949365 | rs1800890 | A | T |
| 1 | 206950002 | rs3001101 | A | C |
| 1 | 206950003 | rs2945417 | T | C |
| 1 | 206950608 | rs11119514 T | C | |
| 1 | 206950621 | rs11119515 T | G | |
| 1 | 206952204 | rs10494879 C | G | |
| 1 | 206952748 | rs6676671 | T | A |
| 1 | 206954566 | rs12123181 G | A | |
| 1 | 206954759 | rs57060549 C | CA | |
| 1 | 206954784 | rs144436741G | A | |
| 1 | 206954794 | . | G | A |
| 1 | 206955315 | . | TGTTATATATACA | TAGTTATATATACATATATATGTA |
| | | | TATATATGTATAT | TATGTTATATATACATATATATGT |
| | | | GTTATATATACAT | ATATAGTTATATATACATATATAT |
| | | | ATATATGTATATA | GTATAT |
| | | | GTTATATATACAT | TGTTATATATACATATATATGTAT |
| | | | ATATATGTATAT | ATGTTATATATACATATATATGTA |
| | | | (SEQ ID NO: 22) | TATAGTTATATATACATATATATG |
| | | | | TATAT T (SEQ ID NO: 23) |
| 1 | 206955340 | rs11273390 | T | TA |
| 1 | 206955408 | rs145665559 | ATG | A |
| 1 | 206955651 | rs6686931 | T | C |
| 1 | 206957092 | rs6667202 | C | A |
| 1 | 206957449 | rs4072226 | T | C |
| 1 | 206957558 | rs4072227 | C | T |
| 1 | 206965833 | rs147597174 | G | A |
| 1 | 206970628 | rs11280588 | G | GTAGAATTC |
| 1 | 206980503 | rs186302513 | C | T |
| 1 | 206988295 | rs144443711 | C | A |
| 1 | 206988346 | rs147404592 | G | C |
| 1 | 206988433 | rs1400988 | T | C |
| 1 | 206991253 | rs4440852 | C | A |
| 1 | 206991401 | rs2883034 | G | A |
| 1 | 206992162 | rs11373916 | C | CT |
| 1 | 206992801 | rs11119629 | T | C |
| 1 | 206992925 | rs113703997 | T | TA |
| 1 | 206994404 | rs2138992 | A | C |
| 1 | 206995478 | rs6685379 | G | A |
| 1 | 206996355 | rs12096695 | G | A |
| 1 | 206997892 | rs2056226 | G | C |
| 1 | 206998706 | rs2056225 | A | T |
| 1 | 206999963 | rs908703 | G | C |
| 1 | 207000060 | rs908704 | G | A |
| 1 | 207000952 | rs4240849 | A | G |
| 1 | 207001000 | rs2883035 | C | T |
| 1 | 207001040 | rs2352794 | C | A |
| 1 | 207001053 | rs147886503 | AAC | A |
| 1 | 207001190 | rs6540645 | G | C |
| 1 | 207001709 | rs1028181 | T | C |
| 1 | 207001879 | rs1028182 | T | C |
| 1 | 207002356 | rs5780365 | C | CT |
| 1 | 207003319 | rs4845143 | G | T |
| 1 | 207003374 | rs12022129 | G | A |
| 1 | 207003553 | rs6660520 | A | G |
| 1 | 207003577 | rs6663563 | T | C |
| 1 | 207003583 | rs6660537 | A | G |
| 1 | 207003919 | rs113193509 | G | GTT |
| 1 | 207003956 | rs7513988 | C | T |
| 1 | 207004069 | rs7518426 | A | G |
| 1 | 207005321 | rs11119670 | C | T |
| 1 | 207006214 | rs2243156 | C | G |
| 1 | 207007641 | rs2243158 | C | G |
| 1 | 207009388 | rs2243168 | T | A |
| 1 | 207009910 | rs2243170 | T | C |
| 1 | 207010626 | rs2073186 | T | C |
| 1 | 207010834 | rs2243171 | A | G |
| 1 | 207010984 | rs2243172 | C | CA |
| 1 | 207011485 | rs2243174 | G | A |
| 1 | 207012081 | . | TTTCCC | T |
| 1 | 207014472 | rs2243188 | A | C |
| 1 | 207014776 | rs960326 | C | T |
| 1 | 207015957 | rs2243191 | T | C |
| 1 | 207016225 | rs2243193 | A | G |
| 1 | 207016648 | rs4845144 | G | A |
| 1 | 207017805 | rs149441664 | GTAATA | G |
| 1 | 207018394 | rs7532642 | T | C |
| 1 | 207018432 | rs112204403C | CA | |
| 1 | 207021819 | rs200352185 | CATACTGAAGA | C |
| | | | (SEQ ID NO: 24) | |
| 1 | 207021858 | rs71152496 | G | GTTT G GTTTT |
| | | | | (SEQ ID NO: 25) |
| 1 | 207022139 | rs4313398 | A | G |
| 1 | 207024138 | rs76757827 | G | A |
| 1 | 207026356 | rs143405835 | G | C |
| 1 | 207026382 | rs148368340 | C | T |
| 1 | 207026835 | rs1713233 | T | C |
| 1 | 207027478 | rs34492629 | TA | T |
| 1 | 207028395 | rs34653076 | CTT | C CTT CT |
| 1 | 207030985 | rs1033272 | T | C |
| 1 | 207031187 | . | G | A |
| 1 | 207031737 | rs34778683 | CA | C |
| 1 | 207032089 | rs11119726 | T | A |
| 1 | 207032268 | rs570249 | G | A |
| 1 | 207032839 | rs552760 | C | G |
| 1 | 207033330 | rs150239537 | T | C |
| 1 | 207033714 | rs523435 | A | G |
| 1 | 207033778 | rs118019112 | G | A |
| 1 | 207033965 | . | T | TAAAA T |
| | | | | TATATATATATATATATATATATA |
| | | | | TATATAAAA (SEQ ID NO: 26) |
| 1 | 207034352 | rs11808756 | T | C |

TABLE 2
hIL10BAC-ATA compared to reference genome for identification
of variants

| Chrom. | | | | |
|---|---|---|---|---|
| No. | POS | ID | REF | ALT |
| 1 | 206850230 | rs7522247 | A | G |
| 1 | 206858172 | . | T | C |
| 1 | 206888109 | rs34899945 | C | CA |
| 1 | 206954784 | rs144436741 | G | A |
| 1 | 206964646 | rs71877178 | G | GT |
| 1 | 207026835 | rs1713233 | T | C |
| 1 | 207027478 | rs34492629 | T | TA |
| 1 | 207028395 | rs34653076 | CT | C |
| 1 | 207030985 | rs1033272 | T | C |
| 1 | 207031737 | rs34778683 | CA | C |
| 1 | 207032268 | rs570249 | G | A |
| 1 | 207032751 | rs574773 | C | T |
| 1 | 207032839 | rs552760 | C | G |
| 1 | 207033714 | rs523435 | A | G |
| 1 | 207033951 | rs71570041 | C | CATATATATATATATATATAT C |
| | | | | CATATATATATATATAT |
| | | | | (SEQ ID NO: 27) |

### Example 3

### Construction of Transgenic Mouse System Expressing a Cytokine Receptor

[0089] BAC clones containing the genes encoding the human IL23 receptor (IL23R) (human IL23R and IL12RB) genes and regulatory regions is identified and used to created hIL23RBAC transgenic mice. The DNA is subjected to restriction enzyme digestion and the insert is purified for microinjection. The purified BACs are of appropriate length and are injected into fertilized mice (e.g., C57BL/6). The founder mice are screened for the transgenes by Southern blot analysis. The surviving founder mice are mated with wildtype (WT) C57BL/6 breeders to expand each colony. hIL23RBAC transgenic mice are created for wildtype hIL23R components as well as one or more SNP haplotypes within hIL23R. In certain embodiments, the inserts for the wildtype and SNP versions of hIL23R are the same length.

[0090] Mice from separate litters in each founder line are used to assess transgene copy numbers. Quantitative PCR assays are designed to detect the hIL23RBAC transgene. Data are analyzed and compared to a standard curve of known genes with varying copy numbers.

[0091] Basal tissue expression of human and endogenous mouse IL23R in hIL23R mice is examined. It is expected that the human IL23R BAC cassette supports appropriate human IL23R expression. It is also expected that hIL23R regulates target genes in vivo. To assure a fully functional hIL23R, human IL-23 (p19 and p40) is introduced by gene targeting to replace the endogenous mouse genes. Animals are backcrossed to generate genetically humanized mice with a fully functional IL-23/IL23R signaling pathway.

### Example 4

### Construction of Transgenic Mouse System Expressing a TNF Receptor

[0092] In one embodiment, transgenic mice that express functional human wildtype and variant FAS are constructed. The enzyme is encoded by the TNFRSF6 gene. A BAC clone containing the FAS gene and regulatory regions is identified and used to created hFASBAC transgenic mice. The DNA is subjected to restriction enzyme digestion and the insert is purified for microinjection. The purified BAC is of appropriate length and is injected into fertilized mice (e.g., C57BL/6). The founder mice are screened for the transgene by Southern blot analysis. The surviving founder mice are mated with wildtype (WT) C57BL/6 breeders to expand each colony. hFASBAC transgenic mice are created for wildtype hFAS as well as one or more SNPs within hFAS. In certain embodiments, the inserts for the wildtype and SNP versions of hFAS are the same length.

[0093] Mice from separate litters in each founder line are used to assess transgene copy numbers. Quantitative PCR assays are designed to detect the hFASBAC transgene. Data are analyzed and compared to a standard curve of known genes with varying copy numbers.

[0094] Basal tissue expression of human and endogenous mouse FAS in hFAS mice is examined. It is expected that the human FAS BAC cassette supports appropriate human FAS expression. It is also expected that FAS regulates target genes in vivo.

### Example 5

### Construction of Transgenic Mouse System Expressing a Drug Metabolizing Enzyme

[0095] In one embodiment, transgenic mice that express functional human wildtype and variant vitamin K epoxide reductase complex subunit 1 are constructed. The enzyme is encoded by the VKORC1 gene. A BAC clone containing the VKORC1 gene and regulatory regions is identified and used to created hVKORC1BAC transgenic mice. The DNA is subjected to restriction enzyme digestion and the insert is purified for microinjection. The purified BAC is of appropriate length and is injected into fertilized mice (e.g., C57BL/6). The founder mice are screened for the transgene by Southern blot analysis. The surviving founder mice are mated with wildtype (WT) C57BL/6 breeders to expand each colony. hVKORC1BAC transgenic mice are created for wildtype hVKORC1 as well as one or more SNPs within hVKORC1. In certain embodiments, the inserts for the wildtype and SNP versions of hVKORC1 are the same length.

[0096] Mice from separate litters in each founder line are used to assess transgene copy numbers. Quantitative PCR assays are designed to detect the hVKORC1BAC transgene. Data are analyzed and compared to a standard curve of known genes with varying copy numbers.

[0097] Basal tissue expression of human and endogenous mouse VKORC1 in hVKORC1 mice is examined. It is expected that the human VKORC1 BAC cassette supports appropriate human VKORC1 expression. It is also expected that VKORC1 regulates target genes in vivo.

### Example 6

### Construction of Transgenic Mouse System Expressing a Drug Metabolizing Enzyme

[0098] In one embodiment, transgenic mice that express functional human wildtype and variant cytochrome P450 2C9 (CYP2C9) are constructed. The enzyme is encoded by the CYP2C9 gene. A BAC clone containing the CYP2C9 gene and regulatory regions is identified and used to created hCYP2C9BAC transgenic mice. The DNA is subjected to restriction enzyme digestion and the insert is purified for microinjection. The purified BAC is of appropriate length and is injected into fertilized mice (e.g., C57BL/6). The founder mice are screened for the transgene by Southern blot analysis. The surviving founder mice are mated with wildtype (WT) C57BL/6 breeders to expand each colony. hCYP2C9BAC transgenic mice are created for wildtype hCYP2C9 as well as one or more SNPs within hCYP2C9. In certain embodiments, the inserts for the wildtype and SNP versions of hCYP2C9 are the same length.

[0099] Mice from separate litters in each founder line are used to assess transgene copy numbers. Quantitative PCR assays are designed to detect the hCYP2C9BAC transgene. Data are analyzed and compared to a standard curve of known genes with varying copy numbers.

[0100] Basal tissue expression of human and endogenous mouse CYP2C9 in hCYP2C9 mice is examined. It is expected that the human CYP2C9 BAC cassette supports appropriate human CYP2C9 expression. It is also expected that CYP2C9 regulates target genes in vivo.

### Example 7

### Construction of Transgenic Mouse System Expressing an Inflammatory Gene

[0101] In one embodiment, transgenic mice that express functional human wildtype and variant Toll-like receptor 4 (TLR4) are constructed. The enzyme is encoded by the TLR4 gene. A BAC clone containing the TLR4 gene and regulatory regions is identified and used to created hTLR4BAC transgenic mice. The DNA is subjected to restriction enzyme digestion and the insert is purified for microinjection. The purified BAC is of appropriate length and is injected into fertilized mice (e.g., C57BL/6). The founder mice are screened for the transgene by Southern blot analysis. The surviving founder mice are mated with wildtype (WT) C57BL/6 breeders to expand each colony. hTLR4BAC transgenic mice are created for wildtype hTLR4 as well as one or more SNPs within hTLR4. In certain embodiments, the inserts for the wildtype and SNP versions of hTLR4 are the same length.

[0102] Mice from separate litters in each founder line are used to assess transgene copy numbers. Quantitative PCR assays are designed to detect the hTLR4BAC transgene. Data are analyzed and compared to a standard curve of known genes with varying copy numbers.

[0103] Basal tissue expression of human and endogenous mouse TLR4 in hTLR4 mice is examined. It is expected that the human TLR4 BAC cassette supports appropriate human TLR4 expression. It is also expected that TLR4 regulates target genes in vivo.

### Example 8

### Construction of Transgenic Mouse System Expressing a Chromatin/DNA Modifying Gene

[0104] In one embodiment, transgenic mice that express functional human wildtype and variant histone deacetylase 2 (HDAC2) are constructed. The enzyme is encoded by the HDAC2 gene. A BAC clone containing the HDAC2 gene and regulatory regions is identified and used to created hHDAC2BAC transgenic mice. The DNA is subjected to restriction enzyme digestion and the insert is purified for microinjection. The purified BAC is of appropriate length and is injected into fertilized mice (e.g., C57BL/6). The founder mice are screened for the transgene by Southern blot analysis. The surviving founder mice are mated with wildtype (WT) C57BL/6 breeders to expand each colony. hHDAC2BAC transgenic mice are created for wildtype hHDAC2 as well as one or more SNPs within hHDAC2. In certain embodiments, the inserts for the wildtype and SNP versions of hHDAC2 are the same length.

[0105] Mice from separate litters in each founder line are used to assess transgene copy numbers. Quantitative PCR assays are designed to detect the hHDAC2BAC transgene. Data are analyzed and compared to a standard curve of known genes with varying copy numbers.

[0106] Basal tissue expression of human and endogenous mouse HDAC2 in hHDAC2 mice is examined. It is expected that the human HDAC2 BAC cassette supports appropriate human HDAC2 expression. It is also expected that HDAC2 regulates target genes in vivo.

The application's sequence listing, which the Patent Office published only in electronic form, follows.

SEQUENCE LISTING (27 sequences)

SEQ ID NO: 1 - DNA, 181089 bp, Artificial Sequence
  rp11-262n9 bac sequence ("hil10bac-ata")
aggcagccgttaacaccttcagaaagagctaagatagaagggatgatagaggccatcctgaccaatattttgaggtcattttctgggtcagaaatttttgtgactgagtcttatgtatatatatctgtcacttttgctttgggggaatttctcattttatcacagaaatactagcctatgacatgaagactatttctctctggctctaagccatttttctttccaagagtgggtttttagtggacagagcttcttctgtaaatcatgctccttcttgcaatattttgtttgcggtactagcagtggatacaaaggctgctttatctgtgttcatgcgcagatccgccagcctgtggatgatcctcactcatcaagagagtgttagctgaaaatttccaagagatccacctccataaatttccaccctctgtcactcattcataatgccacgtcatagtaaaacaggaaacttttactccatgatggtgtgaaggctgtgtgggggaatcttgaagaaaaagattgtcacaatgtatcctatcatataacccagtcatgcaaattaacatagacctatattctgtaacagattaggccaagatggaaggaaattgaggtgtggaaaatttatgttgctctaaaatggaaagaatagcccatacctcttcaggcaattcctgcccagaaatagcagatatcatatttctgacattaagaaggatatgtgagtatatgtctgctcaggatctatagtaaggaccatgagcatggactttgggtcagaaagatttgggtcctgtccttcgctagtggaatgactctgagaaagttatttaatttctctgggactcagttttcttgtttatacaacagataagtgaggataacagtacagacctcatagggctgtgtaagagtaggataaggtttggctgtgaatgatagaaaacctagaccatcagtcacttcaacaagaaggccatttattgttctttcatataaaagtctgggtaggtggctcattgctgatatgatggatccaggttcaccagtatacagactctttctgtccttttgttctgtcttcctcaacctgtaacctccaattcaccatccaagatggctacagctgtgaaatttttattccagtcagcaggaaagaaaaaagagaaggagaagaagaaggacatacttctttccataaaccacttccacttacaagtcattggttataacttaatcttatgaatgtaaccggctatagtggaggctgctcaagtgggaaatgtaatttttattccaggcagtcttgtgcttagctaaatatggggtgctctttactatcaaagagaggaaaaaaaggtgttagcccacccaactagcaatctcagccacggatcatcatgagatttaaatgagacaatgcaggtagagggttgagcacagtgttgggcactcaggaagcactcaaaaaacattgtcatcgtcatcatcatcatcatcatcaacatcatcatcaccatcatcatgagaaggtgaggaatactttgaaactgtgacaaggcattttcttattttaacctggtcttgctgctaacatcacccttggccacctcccttttaaggtgatttgagtttcatcttttatgatacctttgaacatgccttcatgaaacaaaactatataaaaaggaaagcaagggaaaggtgaacataggactcaggatgatggggtcttgggccatgaaaatggaggggttgggggagtgtgtgtggaggaatcatctagttagatgtaaattattgtcgaagttctagtttttattttgggtagtggattcacaggtgcttactgcattattaaaaataattattaactaacaataaaagtggagctgcatggatcaatgatccaatgacgagagtgtgtcatgaatcaaggattataattaatccatttctatgtacctgaggtccttaaattgtctttgtgtgtactatattgcatggcatatgtgtttgcatgttaatagtagataaaaatagtactttctatttgcatagactttcaagttttaaagcgcttttacacatccataaaaactgtttattaagtagttcattacagatggctaagagcctggtgttacacaaataggactttggactgcttcctgtaggaaagtttttattttatccttgcacaagccctacaaagtaggcaaggcagatgttattgtcactattttgcagatgagaaggaaggaactgagagagcaaggggctctcatgaggttacatagcgagtcagtatcagaatggaacttaagactcaggatctcttggccagtgcttctgcatttagcacatcttactcctcaattattcatccactaggcgtttattctgttacatggcacattgtgctcatgtgttgtgttcatatatgtgtgtgttttctggtgctgtgtgtgcagttcatataatctctatccactatgtatgtaccctcagagtccctgtgtgccccctaggcctatttggctcttgcagctccgggaggactctcaggtgggaattcagttgtcctgttattcctagatcattgggcctcaccatctccctggagctccagctaggtaggaaagcagctttgatatcaggaatagatccgtaggccatgagcacagagcagaggagcaagccagcaatgtctaaataatggtgatatttaatatttcatgataatgtatagtttatgctttaggatgtgttctcataattactatttcattttattctctctcagccccgaaagtagattttgttgtttttttcttttctttttcagatgctgagagatgttacatgtcttgctcaaggtaacccagttggaggacagtcttggcttcagctcatttgtctctagatcctgtcatcttaccactgtgccttgctgcctctgaaaaggcagaaggaagttattctctttctagctttgtggagaaaagcaggtgatacctcaacaccaagccatagggagcttccagtgactctgcaaagaaaaaaaagaccaactcagactccagagcagccccaccagagcctgagcagttggagccttccaccttcccacccctgcgttcctcttgtccttgggcatctcctgtgtgtgcttcggggaggtgatagcagtgctatagaagtagtggagtgaagatgttttcctatccccgtggccttagatagtgtctttgtctttgaagagtcaggggcatctggggagctgtctaaccgtatctatcctgtagactcgggaggaagctgctggctgctgtagacagaagagaatccctgtgcttcgggctcctaggaaggtgtctgccatcctctctgtgccactgttatctgtcttcttccccatcagataacaccatccaccgctgcagggctgagcacggcaccttgtacatggagctaagcagatgctgcttgagaagagcatatgtttgtgtcgggggaaacatgtctctccttggtccacagagccctacctgccccaggaaaggacagtgttgggagggtaactcccacccctcactcctccccctcattcctgcctccacaagcatcttctgggaaaggtgaatgagggaagagacatttgcacttgtcccttacctacctaagttctatccccagtggccacttctgggggtgttgtcttctctctggagttttgggggacctattagggggcatgtgtggccataggtcaagcctcattctctaactggccttaccaagacttaagctgaggttttgtgttcacctgtctgggttgcttgccatttctcaaatgttctgccagtcagaggtgggaggaggtcggcaggaatgtacttggtcatctcgaaccccatcagaatgtgtgtggaggcctcctggcagcttctatgcagggtccagctagatccctgggcttttcctgagatacacggggctaacccacttcttacggattaatttttccacatcggaaatcagaagccattccccagggcctccccttcagtttcattatctcctttgactctgcccacaacctttgaaaaggtctcgctgttcttcccacggagagagaggtgcaaggcttgctcagcctcacacagccaatccgtggcaaaggatggcgggaattcaggtggccccaatctcaacccatcctcttcccaccctgtatcctttttagtttatttacaggaaaacatgttcaaaggtataattactaaagtgctcctggttacacaataatacgtctttactgaaaaacaataaattaatgagaaaagagatgcaaaaaacctcagaggaaaatgttgaagttagggaaatatttaatacgcccgcctttggctcacaccttttcctgggatgaatgacccctgtgattccagctcccccccacccccacgaggtctcatctagctggatacctacaagccatccctgtccttggaaatacacccctctcccaattcgctgccgctaagaagcccagacaattggagaggagtggattttccatctgaattatgcagctcctttgacacgcctcccctctccctttgcatagccttggttaagaactagcatttcttcgtcccctctccctgtcccctctcactgtccgcgaggcagcagcccccagcctactccgcgatcctcccagctcccggcaccgcgcgtcctcccctttaaggcccgcccctccccccacgccacgcctccccaggccccgccccccgcccctcccctttaaggaccggccccggacgcagacgaggctgtgacgcggccgccggcccggggctgggtacattgtcgcgcggccgcttccccccggccgggcccccgccgccccgcggtccccagagcgccaggcccccggggggagggagggagggcgccgggccggtgggagccagcggcgcgcggtgggacccacggagccccgcgacccgccgagcctggagccgggccgggtcggggaagccggctccagcccggagcgaacttcgcagcccgtcggggggcggcggggagggggcccggagccggaggagggggcggccgcgggcacccccgcctgtgccccggcgtccccgggcaccatgctgtccaactcccagggccagagcccgccggtgccgttccccgccccggccccgccgccgcagccccccacccctgccctgccgcaccccccggcgcagccgccgccgccgcccccgcagcagttcccgcagttccacgtcaagtccggcctgcagatcaagaagaacgccatcatcgatgactacaaggtcaccagccaggtcctggggctgggcatcaacggcaaagttttgcagatcttcaacaagaggacccaggagaaattcgccctcaaagtaggtctggggcccggggaggggaggcggggccggtcccgggccctggagctccacggcgtcgggtgcccgtcccggcctgggtcgcggcgcggggcggaggggtggccgcggcggggcggggcggggcggccgggccggcggtgccgagtgcggcgcgggcggcgggtcccagcgccctcgcctccctgaccgcttccggccgctcccgggcgggagccctgggacccgctcctggggactcaggggaccctgccattttggggtttgagcgggatccagccgagtcagaacggttggcttcgggacttctgctaatttcactccatctcaaggaagtgattttggggttggtggttccccgtcctctcctccctcctttttctctctctgcgggcacaaaaggcccattactcattgagccggttggtcggttggtttggagaagtcggatcgcagaggtttatttagcctcgctccttatttgggagccggaatgtgtgatttcacttccccgagcctcgcgagggcagccgggccgccttggggcgcgccgggcaggaggtgtgcggcgggagggtcctgggtgtcccccggctgcgggggcgggattatttggatcccggagctggccccctcagctggccccctcccacgcccgcgcggggcggctccggggagaggccggcggtgtccgcggcccggctgatcattgtgaacagagtctgtaacccgcggccgggcccgtgctgattccgcctcctagagagggccacttgctgtcctggactcgcgccgtgatgggcagtctgaggaaacattatccttgagccgggggagcccatcccttttctttctttaaggggtgtggtggtggggagaataaggattcaagtgagaatatcgacttcagaagttaaacacaatggactgggaggtctcatgagatgggtgggtccgcagtgaagtgtgagccggtcttgcagggtcaccaacaaggttttcctctcacaggggtttcaggtcaaaccaatctctaaaggtgacgcctcaggtctgtttcccctggggtgtctcaatgattggaggaggagaaaaatacttcctgtgttatatttttctcttccccttcagcccccacagcgagctgtatttcagttgtcaagtacaaaactcagaaatgtggtatgggtggaactattggaatatacgatcagatgttttaaaagaaacaccagtacttcggggttgtacggggcaagcatgttccatttctagattttaaggcctctagaattgttttcctgctgctctcatactcaaccctgttacagtgctttgctttctactgtaagttattgctctgggatctcggttgttgtttagtgttgactgttggagaggggataagtatcttcaacacttcaacatttgtgtcttagacttctctttccctactcataactgaagggaaaggaggaggaggagttgtttggattgagcatggctctgaccttggggactggagttgggtgaatacagtttgaccacagttaacctgtatcattgaggaagtgacagacggtctttacaggagtgtttgctgtcccctctgagacaccatctgccttcacccattagtagtttggggacactggctgttcattctcttggatatttggaatattatgtaaagacttcagaacaaaagctcccaacttctgctctgtattctgtttaatagacacacgcacaaaatcatcctataaaatgcttttgagtggcaattcagatttctcttgtaactaacgagagagaggtttacatatttttctactttgaatagttttggaaggaaaaatccagcagcgtgttaaataacactcatagtttatccctctcaggttagaagtgggcgaagagtgaagtcagtctgttttgacaggcagcctgctcccagatcttttaagttgactcaactgttaaattgtggatttcccacacacgtctttgtgttaaaacttaataatggaggaagaaaggagagacaaggcatttggagactgacagcagtgttaacagcacttccatatccaaatattggctgagacataattacagctgtggggggaatctggttcaaagaacgctgttccagagacacacaccaaagagatttctagatcttgaattttgattaacctcaggtgctgagtagtgaaatggttttcaaaaccagaagtctagtgattataaagcaggagaggaagatggagtggggcaagagggattacccccttgggaaggtgcctgagaaaaggggaggagacctctattctacagtgtgccgaggccaatgctgggggctagggcagagctggagggcaggagcccagcctctgctggggttcagaagtctgctatgttgcagccctgagagttgatgggagctggcagctgcttagatgctctcctctctgcctatagtcggtgacctcttagccctgttaagtgaaatcagcatttgaaaaagagtcccagctcaccctgctgcttctctccctccacctcagagagctcccatttaaatgcttttggtgggtgctttgacctcacctcaccatctctcctggctgcttttgctaagttctgagtcatgcttccagtcagagttgcaagggacttgaaaggtcattttgtccagcccccttattttgcagaagagaaaaccaaggcccagagtgagggagtgacttgttcaaggtaccatagccattcacttggcagaggcaggattggaacccaggttgcctgactcccagtctcaggcttcttcccacttacttcctaactgagccacgggctcaggcacatggccacctgctgctccagggtgcttccagcctgaggagctgttctgtcacctcaggccctgactgacaagaggggaggtcagcgaagggggctggatgggtatttgctgctcctgagaacagtccccaaagttggaggggaacttcaacagtagcttcatgcatttttttaaccactccctcccccttttaagagagtatttgataggcaccttacttactattttttgtacaagaacatgggaattctattatttttatttttattttttttgagacagagtgttgctctgtcgcccaggttagagtgcagtagcacgatcttggctcactgcaagctctgcttcccaggtccacgccattctgcctcagcctcctgagtagctgggactacaggcgcccgtcaccatgcccggctaattttttgtatttttagtagagatggggtttcactgtgttattcaggatggtcttgatctcctgacctcgtgatctgcctgcctcagcctgcctaagtgctgggattacaggtgtgagctaccgcgcccggcctgtattacttctttgataaggacacctagtctcaacccacttgtgtattaattagttgtattccccgggagggttcctcagctgcttgccgcttcactgtgtcatggtgacccttaggtgttagctcaacaaatttaattaaagactgtatcgttgttctctgctgtgcaactctgattaggtgaagcatgttactgctttataaaatatagaatgttgtcgtaacttatctctgtgtatctttccattgcgtggattagagaaaacaaggtcctgtagtttcttttcctttcctttctccagcattcctctctccctaggtcatggaagtgccactgcgatgtggcttcctttgttctggtgaaggggagatgattggagcctctcatgattattctggatgctgttggagggaaatgccagagctcccacatccccacagtacaggcaccatctcctttccaacacacctcatactgtgtacctgtggagggcaagacagttagtgtggctaggtgagaggcagtgtcccaaactggagtttgctggagttgtcacaaggttaggaaaatttcattgaccaagccagcctcttttatatgcaatatggttacaggtaggtaacagtttgctgaatatctatcataagcttagttgcatggaggatacacatgtaaaaaatggcctgtaaaattttgagtcaagaaacttatttagagaaggtgaaattaacacatgtaggctagggctgcactgtccaatctggtagccactaccctcacatagctaattaaattaaaattaattaacatgaatggattaaactaaattaaatttgaaaaatcagttgctagccacacttcaagtgttcagtaaacatgtggctaatggctatcgaattgaacaatgcagaagaacattttcatccttgcagaacgttctcctagactttgttggtctgggagctaaatcgtgtggctgggaatagaggagctttgaaagaggggaatctgtggtgactccaggagctaagggaggctccagctggggtcagtgggacatggctgtgcctctgaggagtgagcaagtctgtgagaggtgtggtgacattggcctggctagaactgaggggaggaacaggaggtcagagtggtcaggggttggtggctccaaattgaagctaactcatcttgtgtcaaagcaggctttaaagtgtttgaggggcatgaaggtgtcaaaaaaggttaggaatcattgaagatgggcttacagaattatgagggaagggtcaggtttgtggtttcagagatcctgtccctcctggccgtagccctgaccccagccctgacccctggctcctgcagcagggcccttggcatccactgaggcaagattgaagctgggtcagctcactgtccttttttacttgtgaattctgggctttgactgagcttggagacaatctccagctaagatacgggatcagtggctgacaggaggggagagacaagcagtccctgggccttagggccaaatattggtgggtgtctaggaaacaaaagaacccctttgtgggaggaggaaggtattgggacctgtgatgtttctgctacttgggacctgagaggttgggccatccataattgatgatttttcttatgaagcaggtacaggggattgggaggagggcctggaagagcccagcctcagaactgctggaggcaaacttaatccttgggctaggggaggggccaaagctcctgttagccagagcccaggagtgtgctgagtgggtgccaggaggaatgtcagccaagatggggaagagcagggcacagtcgtctgcatctgagccattgcccagttcccaagcagccttgccatgctctgagctggggttcttcctggtggcgtgatgtctgtggtgcaggattcactctattctcctacctttcctctacttcaggccctgccaagtgtcatgtgaggtctcttttccccctcttccctgcactgtatctttccagatggttctgtgtcctggagggaggtggatgggcagagaagagttgttctttgcagggactgcagcttttcttggtaatggtttgaggcccagtggcaaagcaacccacacttcatagtaacttagaacccacactccctggtcatctttcttgactccttgcacatcactgaggaagaagctggcctagtgcagaaatgttcagtggcatgtccaaggtcttacatggtgtcagcatccgagccacatcttgagacctggttccctgggacctgctcttggtctgggcccctttggtttttggttgctagaagactgtagacctggtggagcaaaactgagctccactaacgcatcagctaggatctttccacatgggttaccttgtaaatgggggcattggtgaagagaaggggccatgtcactggacagtgtaataacgtatggcagttatagaacccaaatcagattgctgtgtaccttttctagtttttaggaaaatactggtattttgtattttaagatatatatatatatatatatatacacacatacacagatatagatatgtagagatgagcttgttaccatgggttatgtgctagataagaaagcaaaaataagtgcatacataaatagaaagcttccagtgtttgtatgctgctaacaagttacatgaccttgaataggtcagctaaactttccaggcctcattgcacagagggtcggctcgagcagctcctgagcaccggcagggtgaggcagtagaaggcggtgctgcaggccagaggtggagggcaggcaggatagcttgctgacttgctccgggtctgaccatcagcagtatctgggtcagcacagatgccctttcgtaagcttagtgcctggctccagggcagcctgtgtccagttaatgaataatcatcactgaccagctgctccttctcttgtgtgaagacttagaaagtgttctatgctggtgactcggcagagaggatagactacgtaatttagcagggtgtgcatcttctctttccttaaaatcagaagaatcatagtgtagtggtggtgcaaagtagagatgaggaactctattccctgtttgagattcctttctcaagttatggggcatttgagggccactgtgatttctggtgcaggctgttccctgtgcacagggatctggttgaggagctaagcgaaggctgaagtccagccactgtctccttgcttggctttgtctttgtgtgtggctgggttctttcaaaggagtgccttctaattcaccaaaggtatggttatggattaggggttgttcttaggttagagttggggactgattcacagagctgatgaggaaattaggatttacattcaggtgaccctcagcccctcagaccaggctgagtaagaagagatatcaggaatccaaggaagcaggaggaaaaggggttgcctggtgatgtctgttctctttcctcctcttcctgcccatgcaaggctagagcagctgtttcagccccggaggtttagactgtggggtcctgtgtgctgggccatcaggtttggtgggaggaggaagaaagccacagtagaaggagacataaagttgggctgggcctctggcagtgaaaggttcttggggtctttattgtctgatcagtaaacacctctgtgtgccagaatgagctgggacaaggccccaaggtcagcccatatttgtatctggtgttctcctccaagaccagccaagctgtgcgctcattctgctgggaacctgagccctccaaaagggtcatatgaaagggcatcttattcttgagggacgtttccaagcatctctgtggccagtgtccatccaggactcatcttagaggtgaagagtggtggccagaggcggaagctagtggccacccgatgggagccttttctgtttcagagcatatgagggagctgagggagctgtactgttgatgccttctctctggctcatctccatgaagattcttttgaaccagaagcaaaggtgaagtctctctgaggggaggggctgaacaggagatctactgactgtccccctgccgactcctccactttcgtcctccggcggggctccttatcctcctgcttgtctacagggagaagatcgagttgttcgtttgctgccattttaatgatccacattgttaggaggctctcagtacacaccggaccttagcagcctggcctcctgcccagggcccagaactgttactcagcccctctgccgaacagctaaaaataaacctgccactgctgcagtctcccctcacagccaggccctgttagctgtcccagtgcttcctgccacaccgctgacctgtttctctcactttctgctgatattctccctgcttgcccctttctcttccagcctgagcttggtaggtgatttggggctaactcactcttctgagtgctgggagacgtgctatggtttttatgtctccaggtgtctagatttgtgtgtatgaaagctccgtgaagctgtcctgcttatttcccagtagggaaagggttagacaaaaaggagagtgaccaagctcatcagagtggatcagaccttctactgtgctcgcctccagccctggcttcctccagttttacctccaagcaggcctctttgccagagttacctggttatggtaacagagttaccatagttatatgctaggacagccccacatgggcagtctgccccaggccttcaacccgactgccctgtcaccgagcatgctacctaccgtgtactcctgccctgttgctacgttatattctccacctccgcagtgtgaggctttgggctaccacattcaaaagtgtgacctcatcttgtcagcgtccaagaataactgggccctggctctcaggatctccttcctgagtcaggccatggcacctctggcccttccagctcagccacatgcagaatgtcaccgagtgcatgggtttcttctacctcttgactgcagtattgatgtgtgtccatggaggtgtggcctcttcctctactccccagggatcctggagacttgtggagcaagatgaggaaaggggctcaggtagctagaatatttgcttagctgatagatactgggcagagtctgacattggcattctgttcttcagcgtggcgttagtattctttctgattttttctaatccctagacaggtgttgatactaatcgtggcctaggagggctctatgtctgctttcaggaattatggtttatttgggggaaggggtgtatggtggagagtgatggcaatgacaaccaagacataggacttgaggaacccactgccttcagctagagttacatactctgaccatgtgtcgatggcctccttctcccacctctcccctggggccacatttcctctgcaaggaaagatttatctgccaaggcccattggcctgtgcagaggaagagttgggcatagttgctaagtgtttatttttaactctgacagaaggagcccctgtcctcagaatagccataccctctgtctttccctatcccgactgccttccttggcttctgtgattcctagaagaaggttagtaggattctaaaggccaggcttcacgggagctggagaaggctagcttctctaagtgaggaatctgcaggttgctcgtcatgcttggcttctgcagagctcaaagggtcctgcggggagagccctggacactaaaggccgtgtgtctggaacttggagaattctaggaatgcaggtgacctgatgaggaggctgcatgtgccctgcagctcagagcagcctggctgcacagctgagttggacagcccagcaaggggtcatcccataccttctacatccttacaggcacccagatctctggcagatggggaggccacagggagaaaatgagcatatgtagtaacctgccctggaaacacttgcgcttgcagacacgccaagtgctgtcattccctctgactgccaggctcacgagcatcatgtcctttccagcagagcccacctgcgactcttagtgacttcataccctttgtgttctcttcccctgatgtgctttagtgacctgtgctcacagagaggaggaggaagggtggcagtgccccctctcctgggtctcagactttcctgactttatgcatttgatttggctacctgggctcggatactttaaaagaaaataaaattaggtttgaggtgtaaccagagagagaaggaatagagagtagtagggggtgggatgggtggttgaaacatgtggctaactctgagaaccctcagctatggaaggaaggtcttgcccccatgattcttcggcgtgcagtgggggattagtttgcccagagcccagctctgatcatgtagcttcccagcttaagcccttcagtgggtctctctgcctgcagaatacatgagatatccacatctttcccagatctggccctgatctgtttttttttttttttttggaacacatgctttttttttctccccagcttaagtggcttatatatgttgtttctttaacagaactgtgctttccacccccacaccttagcatctatccatctgcatcttctctgtaccatgcctgtcccccgtcctgtctatatctaccttttccaccctgcacagatgctgcttttccagagcctttcgcaccaaaagtgggtcttcccatccttccccatcaaacttgctgatacactcttaccttttatttctctgtttaagtgcatttctccatgtgcaaggcatctctctctctctctctttttttttttaacaggaaggtaatttattaacggaaaatatttgaggagtcctgtgcacagtgaccatggcaaccccccttcctgcgggtgctgtcagaggggttgggagtgacgtcctcaatctgtccgatcttcatacctgagcgggcaagggccctgagggccacctgggccccaggtccaggggtcttggttctacttcctcctatggctcggagttcgatgtgtagggcagtgatacccagctctgggccacatcccgggcagccaacatagcagcatgtggtgaggattcatctcacctgccttcaccttcatcctaccagtcacacggcagatgatttctttgccagaaagatcagtgacatggacaaaagtgtcattgaaggatgcaaagatatggcagacaccaaatacattctctccttcagccacctgaggtctgaggctgatgacctgttcttccttcttttccttcccctttcaaggtgccatttctgcatgttgtttccagactccgcacaggaacgcaaggcacctctttagatatcggattggactgtaaatcccctgaaaacctacatcttcattatttttgtgtcctcttattttcatgtagtgaccgtatgtcctcattaaaaaactcaggccaggcatggtggctcacgcctgtaatctcagtgctttggaaggacaagtgggaggatcttttgaactcaggagtttgatatcagcctgggcaacataacaagaccccatctctacaaaaaattaaaaaggttagccagctgtggtggcacatacccatagtttcagctactcaggaggctgaggtgggaggatcacttgagcccaggaagtcacggttacagtgagctatgatcatgtcagtgcactccagcctgggtgacagagcgagaccccgtctctgaaaaaagaatcctagagtattttggcactgtgcattatatgcattatacttagctgctgaataaaggtgtgataactgagtaatagtggatgccaccgatattaaatgtgatgtactagaggtaatcctcagagtcagggactgtggcagccctgggagtgggatagtactgggctgtgctctctgagactgagctggggtagagtgatgatctctcacattgtctgttctcattcttctgctgctgaaaagctgctcttagtcttctgagcatttcttccctctacccacttggatctgctgactcaagcaggcaccttctatttctgcttacagagttctcattcttacaaggaccctgaccacagtttctcattgatgcctctcctccttctccctgttccaaggcccctcctattcctgttcagtcatggagatgacccttttgccctttggagaactttaactgagggagggacagatgtggagcttgccaactttcctacagctcctggcattttctagttagctacagacacggcacagacacacagatgcagtccattgttttctatctgctggtcctgctcctgtgtgttgcaagagggacgagtgttaaacactgtattagtccattttgtgttgcactaaaggagtatctgagactgggtaatttatagagaaaagaggtttattgctcacagttctgcaggctgtacaaggatcatggcaccagcatctgcttctggtgaggacctcaggaagcttttgctcatgggggaagttgaagggggagcaggcatgtcacatgtcgagaagagggagcatgggggtgggggaggccctcgactctttttaacaaccagatcttctatgaactcagagcgagaactcactgccacaaggagggcaccaagccattcatgagggatctgcccccaagacccaaacatctcccaccgggccccacctccaacactggggatcatacttcaacatgagatttggaggggccaaatatccaaactatatcaagtacccagttgctgggactgaggtcaaaggtttgaacctcatggggctgcttaactccatgccacaacagatttacacaagaaagagaacctgacactagactggaatctgggagacctggctactaactctacctgtgtggccccaagcaagtcctaggacctgtctgggcctcactcagtttcctcattgtaaatcaacaggactagacttgaccttgaaggactcctgcaccgaaagcctttcatcactgttgttgcatccgcactgctgggaaaataacctgatgctgggaaacaagtggtcggcctgggtcccagggagcctcggggactaagagccatcatctctgtcctcagtttctgcaggacagtgttacttcacctttttcctggctgcagtgtttttattcattcagccaatgtttataaatgtttattgttctccatgcctgcctcctgtcttccctgctgactggccatcaggaggcccagatggcaggattagcttggaatggcagaacagtcaagggtcatcctcttgggtttagacccctttaatacctctgctatatgagatgagaagaatttagaacattgatccttccagcagcttagactagacccctgcctttctaagcaggatttgcctgtgggtaccttctatacccttgagatccaaagcaacttactactcaagaaaattaattagcaatgccaagagtgacttgtacagctcccctaaggatagctcaaaacagcagatagactttgatacaatataacaaatttctattattcagatcactgtaggaaacttagcaactctgtgaaggtttcccagattaataacaagtctttattgagcagatactatgtatcaggcattgtgttaggtgttttacttacattcttgttaatccttaaaataacccttttactgcaaagtgaaagtccccattttacagaagaaacatgttcatgtacagaataattccttagcaattatttattgagcacctactaagtgctaagcattatcttgggctctggatatacatcagtatataaaacagacaaaaaagctatttggggggtgggaagggggaccaggtagaggaatagcaagtgcaaaggcaaaagcctgaggcttattaataagtgtgtctaactctaaaacctaggctccctccagctcacagtattgcctctctaatggtcctttgtgactccattataattgggtacttagatgacctagcaattttaagtttatccaatatttatgggatacttattttgtgcaaattgctacgatgagatgaataagttgtaggccctgcctttggaaacatacagtttagaggaacgaacacccgtgtgtataaaaatgaatgaaagaggacttcctctcaaaatccagatcttaccatttcttgcatttttgtcatttgacccttgtaggccagatggtgtggttcctcgttttgtatctgaaggaagagtttcagggagtgggtgggggtaagtgtctgggcaccagggtggccaataaaggatgcagagacacatgatgggctcttcaaggtgggaggaagtagagggtgggatcactgcctggcatgggcagaggatacttcatggacatatacctgtgacacagccaggggagggtgcagatgaaaatacgtccagtgggatggtttctaaggagaagtgtgagggactccactggggctccgtattttgtctggctgaggagggagagatgctgcctctccaggaatctggtaataggcaatgcttgagattggtgtgaaccaacgcatcacatagagccaggagaagtcacgaaggaggcaagaaaaagaaatggctgggctaaagctgtggcagagccctttttatcctcctttgggccctcatatggcttctcttttggtctgaagaatctcatccttcttgagtttagccttctaggtgaaggagtgggcagactgcatgcagggagacagggaggccgtgtttgtgtccttcagctcaggagctgagagaacagaggtcagggcttgggatggagctgaccgttagtgcagatgggaaagtgaagcaatgggtcgggtctgtttgttcctgagcatgtcctgtgacaaaggaagttgcaacatgtctgtctgtctttctctctctttttcttttctcctttcttttcgtttctttctctctctctctcttctttttttctctttctttcttcttcttactttttttttttttttttttaaataaagaaagaagcaggtaaaaccatcttccagaaaatgccagaaagaatatctggtctgtgatgggtggttcttgcccctcccgctgcaatgcttttcctgtgtagtttttcttttgtccttcctttcccatccacactttccactctcctttcctctgagaggttgtgtctctgcagcaggccagctatgtctccaaagggaagtagtcagtgcttggactgagggaaccttgagagagaatcctctcctttgtcctccaggtgagagagctgttgcatccactcacacctggaaggttgctggtctcctctcgctggacactgagagctgtttaaatttgacaggtggttcctgattcccacctggcattttttgctgctgcacaggtctgtgttgtgtcttagaaggctgagggaatacttacttctcaactcagataaccaccttgttggtaggttcagtgtgtgtctgtgtcaaggcagatgctgggaaaaaagggcccagaatgtgagtgggaggtagaaatcaaggctagaagaccacacatgttaatctggagtacttggtcaggtttgattttggcctgtgtgctatagctgggcaagaagccagttgtgtttggaaatgtacagatgatctattttcctgatgaaaccttttgaggtctggaataaacatagcttgctttctctctttccctcttttgagattcaatttctctcccttggacttctataccctagtagagccaaaagttccagtacaaaccagttttgagactccagcattagtcaactaagggatgttgtaggtcatccctgagaacgagggctgcttgctctggggaagctgggaaatggcaccaggtgtcaggccctactgcccaggatgggatgacagctgctggtgttaattacgtttctgggcagaacagggtaaagtccttgggggtgagagtttttgtttaggcactgtgttccctgtacctgttgcctctggtacagctgctgcagagcccctccttgcctgcagtcttctttgaatttaatctccctgtgatccagtgcatctcttcagactggaggtgagcccagaggagtggtggagggagtggggccagaatttacttgtttgcctggatcccactgagaatacagaagctctctttcacgagaagctgtgctggcctctgtggtacccactggccatatgtgactattaaaattgaaattaagtgttaataacatttaaaattcagttcctcagtagtgccagccacattttaagtgctcagtggttagctagtggccacggttttatgtggcacagatagagaacattttatcatcacagaatagtctcttagacaatgcaagattctgagataatttttctaatcctggtagacacttagctggaaggggatttgaggaagggtacagggagaggttttgaagcccaggtgagagggcaagtagaaggtattcatttagaaaaggatcttaaaaagtatttagtttgtagggccaggtgcagtggctcatacctataatcccagcagttcatgaggctgaggcaggcaaattgcttgagcccaggagttcgagaccagcctgagcaacatggggaaacactgtctctacaaaaaatacaaaaattagcctggcgtggtggcgtacacacatggttcgatctactcaggaggctgaggtgggaggatcacttgagcctgggaggccaaggctgcagagagccgttattgcactgcactccaacctgggcaacagaatgagaccctgtctctaaaaaaaaaaaaaaaaaaaaaaaaagaggagttcaccttgttgaggactacatcctaagagatggtcacctggcccagtggctcccaaaccaggatgattgttagactcacttgtgggtagcatttcaagatacagattcctgggcaccactctttgtgtctagttgaatccaagactcttcagaggaggtaacctggaatgtgcatttttaatgtgctccccaagtgataattatctgggtttggcaaccaccaacctatcatacctgtgcttaaattcttccaatggtaaggagcttatcccttttcaagaaaaccttaccattaaggaaaaattcgctgttgttaaagttctatgtttttcgaatcttgagatttggttctttgaggtcatgaaatcctttggtgctcattgcatctttagagcctcgcagaaccgtcatcttcatccttgcactcagtcttcagcagatatttgagggcagctgtggtgtggtccctgccactccaagtcatggcatgcgtcagagtgcttgatctgccaagggctctagggagatgcagagatgcaacatcattccaggatccttccaattgtcaggccttgctgagagccagaggaaaggtctgaatctcagtggagccctacagggacagcccaagggccatccagccggtgagggccatgtgtgtgtctgcctctctgcatcctgctccgtagggaagagtccctgcttctttgcatgttagcacttgttaacaccgacctggttttcttcagagacattgagagattcagccatccattcccggtaatgacagatgtcatttctgtttagagaccttcagtagcctcccttcacttccagtgtaaaattcaaactcctgaacgtggcattcaagcaagctggtttgtcctgccttccacactttgccttccaggagagcactccttcccgctctgccttgcatttatctgcttccacatcttctcttggatcttacatttgcttatcttcagttttttctggtagaactgtatttatccttcaaggctcataatagattttacccccttactcccctgcccaattccaggcagaactgcctccctcctctgccctagtgagggttcattctgcctgcatgactgctatgcactcaaattacagccccctgccaggccctccctgctagaccaagctccttgcggacaagaactatgtcttacttggcttgatatccccaagtgcaagcaagcaccagtgctggagcctccttttcctgcattggcattcttaccctcagtggcccagagctcatcagctccaatgagaaaagtgctacttagcagctgataattaacagacaggacgtgaggtttggctacttcagaggcaaaactggtatttaaacaataaggtttttaaaaatcaagcattaaagtgtcagcttcagaagcagctacttccaaacataatcctgcccagttagagaagacaaatggaataatgagtggaaccaaagatttctctctagccttgagaagagttcaggggaaagaggcctgggtggcgtattggcaggagattggaaaaggggccttcatatttcttttctctggaatggggctggggctgcttggagagcaggtgggaggtgcttccttagaaagggctgtctgtgttctcttccattcccaatttctatagattggactagttttgccaagtgagcaagcaagaaaaattgggaaacagagggtaggcatcaaccctggcatttatcctaaggtgatgcagcacacacttgtattcagcgatagagacttttccgtaatgcctggtaatatctcattgtattttcttttgatgctcctgggggcaggaggggagagctgacatcagagcctcctcccttctagatcacaaccagagcatgaggaattccccagccccttgaggtacccagacactaaccacaatctccatctctgctgaaggcgttgtaagaaacatgcaggccaggaacagtcagtggcttcagagcaggggcagcctgctaaagaggcagaggcttcttgtgagggcggggagcttgagagtgccctgcaccccatcctgggggaggtgagcatctgcttctgggttcagctgcctgcggaagtcagtgggagacaccctttcagggtctgcttcattatgaatgaagcaaaaagcctatcccaggaaatcacagaggctgatgggtataccccagggtacacaggctatatttttccaatccaaagtgagggtctatctgatagtttttcctggagttggggaggggtcctactttcagatccaaaagaaaatctgagatatgtcatttgaatatgaacgcactagactttctgggaaatgttgaagatttacgcctgtctgagtgtctctcactcgttgttacctgtccatttgttacctggcccacggatggaggaggtcggatggggtctcccagggtccccttgctgggcacgcttggcaggcatcctgcttttcctttcaggttgctggaattagtggtggtggtggctcagctcacccagaccatgtgtgatggttatggtggtgacttctcactgactgctgatgtgtacagtacattgaaagcagtcacccaacttcctttatagccggatacaaaacagtgcctgaggtccagggtcggggaggacttgatgagggaataaaaccagccggctcatctaggggctgatatctgtccgtggtgacataagcacacatgatctgcagtcaaggttgacttgagggtgtgcatgggttcagtcccttttatgaagtctaatggtccttccagaagcttcatcatcatttgaactgaataagtgaagatgagtgcaccacaagtgtgtgtgtgcacttcttaatctgtccattcatctgttcactgcaggcttattgagggagaaacatgtaagcaaggtatttcttgtgtactccaagtggtaggagagctatgttcagggaactgggtgaacttggaagaaggagccgcccgtttctccaagtgcagcgccagtcccgagacactctgtgatcatctaaactggggaacagtctgcaatgcacattactgaattaaaagctctgagaagttctacagtgaaagaatctgtttaactttgtttaacctggtgcttctgccatctatatgacccctttttacttagcacttattaacatcctacggaatactatttgagaaatggcaacagccccccttctctgggagaactgttcagtgattcagagcaaaagtcacctgactctgggtcagcacaagttggagaggtttgaaaaaggtgtatgtatgtttgcatgtgtatgtacggtgggttggggggaggggtgtggcagaggaggggccccggcaggtggcttctattgaaatcagctctgtctgcctccctgttggctttgtgcttctggagaagcttttgtcctggcatgaaaacactgaatagcagctgcatctgtcatgcctgggaagcagcaatgtgcagcatggggttgcatgagtagacactcctgctggagggccaggctgccgagagtgcctgggtattggacaagggagaggctggtgattctgaggcagctgcttgctaatcctggaagcagaggggaacaagatttagctcccttatctctctgccttctcctttccgatgggtgcaattgtgttgactcttgagggacagccaggaagaagcaggtgggctggatgctttctcctttctccaccaacccaagggcatctggagggtggaccagggcagaaaggcgattagctctccgttacccagggagctgagacaaaggcattttgggttaaattcaaggaggaattcagaattgtgaactggatttatggaagtttgtggagtttgaaaattcgagagtcctggctggacttgtgcttggaacgttggtcggaggtggatatgaatgatgggtcctgcagatggccgactcctgagaaatgactgggaggctttactggatttttcgcttggaacaaacccaggcttagggaattcccggagcctgttgcaggcctcaacacccttctggtgcagcttcgctgtgaggcagtggttatttctcaggaaactggcaactgggagtaaatgggagtgtggggtgggaatcagctactcttcctgaggattatacacttccagtgtaattaaggcggggtcaggatttcctatctcttatttatttatttatttatttatttatttatttatttatttatttgcttaatcttaaaaggctgcttttcccctcctggtcttcccacagggacaggagttagtctgttcccagaaggagctaggggaggtgtccttcatctcccattccttcttgccctctccctgcctttccctggccacagccacagagacccagagtcactcagatgggggaggagcaaagccagtccctctgatcattgcctctttgttagtggagaaagggcagatgctgctctgcagttatcccgaccaccctgcaggacgtctgggtgggccgggctttggtttgggaatcgggagtattagctgcagctgccaactgggcttgtacttgcagactcccaggctccaggctctctggaggggaccagcagctctgacccccgtgggcttgctgtggtccccagggagcaagcccttgccaagaacctctgagctcaccgaggcgggtatggggtaaggatggagaaggcctggggagcagaagtgtgcagatgactccctccttcccctcagctgggtatgcatcaccgctgctgggaagacgttcaggccacttctagacaaatcggtcatgatggaaattttttcttgcccgtgggtggggctttacttgttcagaagtggcttcagatgtgctctttctaggtcctggcttgagtgctgagcatttacctgcagcccctcggggctagaaggcagggcagtgtctgagccccttccctaccccttggggctagaaggcagggcagtgtctgagccccttccctacccctcattcattctctcccctcacctgtcattccatccgtcagccccgaacagcttggcagccttgcggctccagctggagcttagtaggcatgtagttggaggagggaacggcactgcagccgcgctcttctctctcccacaggtcttcttcttgttgggcctccacttcctgtcagggccctgcttgcagctgtggcacatctggacctagacggggtatcctgttgtcctgcatgatgaggatcccagatttcccctaggtgatgaccacagtcattccagggtgggagcaggacttcccccacccccaggcactccagagacttcctccaggcccccactaagtagtctgttcccaactccatctctcccccatggagaatggtgggaaggaagttctgccagaggttgtttttggtttgtgaggtaatagactttggtttgagaaacatacatctctccctcttctttaagatgtgaagccagaagcaccagactctggtttccttggaaaccagagcagcaaaggtagagaaaaaaggggctggttgtaggcactgaaattggggaggattctctggatcccagcacttttctggggaatccacatggtctgccctgggccctgggttgtagccctcactgtgttaatggactgtgtaaccttggtaaaatgcctgcaactctctgcaccttagtttccgccaagatgcctaaggtggggaacatgttggctccactcagattctgtgccccagagacctgctgggtgtgtgtgggggtttgggggtagggcatggggctcctgctcactgatttagcatttgctgtggctaaactacaaagtggacagtccacatggagacagttgagagctacttgcacccaggtcctttctttgagaatacagtgatgtaacaggagacttcttgcattttgcctatgtgaaaccagctggattttgctgaagctgtaattgtgtctctacattctttgattcctgtctaaaaaaaatggtttccacaaatgctgtgaagaatagactgacagagctggaaagcgttaagtagggatcctttaaacagatccctacattgtacattgatcccttcaaccacagccagagaggggcagggacttacttgctctgatcacacagtcagaacaagaactaacaacagtaaaggtctgggtagcagcctcacatatgctaagattccctgttggctaagtttgtctgttcccaggtcaccctggccttttgcaattctgccctccgcaggcccctgtgttggctgaaaccagccctcttcttccccttgcgctttcctcctgtgacctcccagccacctcttgtttcccctgtggtgttccccacctgttgttacttcctattcctcctcacaactttttattatgaaacatttcagatgtgcagcaaactggaaagaattgtacagtgaacatgattataccaaaccacctagattcaaccattagccttttactatgtttactttatcatgtctctacgtgtttcaatctctctatccattgaccagtccatcttattttggggatgcattttgtagtaaattgcagacatcaatgtactttacccctaaacatctcagcatacataggcattaatttgagttcaatatttgttcatgcatttttttgatgataatatttatattaacagtgaaaaatgcacaactcttaaggtatcacctgataagctttgataaatgcctctatctgtgcaacccaaacctctgtcaactatagaacaaaaagttttattacctaattaattccctcgtgttgtttcccaatcatcccaacacataccccctcgcaagtgatcacagttctgatgttttctcactgtagattagttttgctttttctggaacctcatataaatgggataatcagtatgaactctcccttttgtgtgaatttcatctgcatggtgacatgtatcagtagtttgttatgctgagcagtattccattgtatagatatgataaaatttgcttctccattcccctgttgatggacatttgggctgtgtccagttttgggctatgatgaataaagctcctgttaacattcttgcacaaatcttgttgtggatgtaatgttttcatttctcctgggtaaacaacgaggagtgtgattgcagagttacaggaggctgttacttattgttcctatctgactctctgccctgccctctcattgtactgtgcacccaattattttaggactgttatcacatccagtccctcagttgctccttcagggtttctcttcttccggcaattcaccctagtttattgaactgttgctcttatgttatgctcctcagatcttttatatcctggttgtcctcctctggaagtataatactcttttacagatgtgttgcccagaactgagttctcgctgctcgatgtgatctacatgtggattctaggtatgggagaaatatagagtgtgggtgcatttggatccctgtcttgagctaggtacttgatctgtgagctgaaggaaatattaactttttggcagccacgtcatggcatcagatcagatgagttaatgtttgtaaaaataccacaaatctaaggtcatattaagatatccattcagcttgaagtcagtccgagcctctgatactaatggcatttattatgaactttctacttgccattgtgtcatttagtttttgcctaccacttggtgagaaaggtactattcaaattagcttaataaaaactccttgatttaaaactagggtacttagctttggcactgttgaccttttggaccagataagcctttgtttgttgtgggggattgtcctgtgctttgtaggagttagcagcatccctggcctctacccacttgatgccagttgcaaccatctatctacccatgcccccaagttatgacaacagaaaatgccttcagacattgccaaacgtcccctggggggcaaattaacaccaggttgagaactattcccaaggtgtagagcttagtcaccgagaaaaaatttaaacaatatagctcttcctgaaaggtaatcactgccagctctttagcatatatacttacagattatgctctttctatggacagtcctcatttttcatggttctaatctgtgtgaatttcagttactatggtttggttaaataacatcagtcctcgaagaatttggctcaaatttgagttgccaggatatatgtattacaagtaactgcatgcagtacaaactttgctgttagctcttcagtccacagatcactatgtacataacagatgctcttcatggtcactgactaatcatgtttcttcttgaagagtcttttggtgattggtcactgcctatctgttcacttcacacgcagacaggaaagtgtgtagttgtgttgcctccctgtctcctagtgagaaactcgtgacattttacaaaaatggacaattgatgagggaattggccaagaaagatgaaatttcaaatgaaatgtggtaatgctggtagtgaatttcaagccaaacgtaatggaattatatagactagatagctgactgtgggaatgtcaacactgtcactgttcaagactacatatacagcctgggaaactcagtgaaggtggcatgtcagcataaatgaggaaagtggtttgatgaaaaggatgaagaggtcccagaggaggtgacactgcagaaggaaacttcacattaaaggcaccttgaagatatttcacaacatcgaaagtgcaaaggataaaacgttagaagcagatccaaacttagaaaggagtatgacaatttgcaaaggcatatgaaagatactcattccatattggatgttaaacaacaagaaggcaagtgctgttcaaattactctggataaggtttttacaaagcaataaaacactcattctcagtgactctaatgttttagagtatacacaataaatagttttactgttttctcatttccttatttataatttgacagcaagagagtttttaatgttttgaccgaaatttttaaatgtcgtggaaaaatcataattttcctcattggtgattagggttgctttgcatggtcatttttatggttccgcattactgtgcaaagcaagagctgcctgtatttacaaaaagtgtgggtgaatacacatgcacacatgcacacaccatgctttttctctttttaaaacattttacaaaatgggatcagactatatgtatcaaattacaacttgcttttttcatggaagttttttttgtttgtttgtttgtttgtttttgagacaccatctctctgtcgcccaggctggagcgcagtggcgctatctcagcccactgcaacctccacctctcggagttcaagtgattctcatgcctcagcctcccaagtagctggtaccacaggtgcgtaccaccacacccagctaatttttgtgtttttaatagagatggggtttcgccatgttggctaggctggtctcgaactcctgacctcaagtgacccacccacctcggcctcccagagtgctgggattacaggtgtgagccactgtgcccagccagaagaatgtatttttgaagaacttttgatttcagtatgtcttaatctacctcattctttttttttttttttttttttatgtttttgagacaggtctcactctgtcccccatgctggagttcagtggtgtgatctctgctcagtgaaacccctgcctcccaggctcaagtgatcctcatgtctcagcttcccaagtagctaggactactggcctgtgccaccacacccagctagttttttctgtattttattcgtagagacagggttttgccatgttgcccaggttggtctcaaactcctgggctcaagtgatccatctgcctcggcctctcaaagtgctgggattacaggtgtgcgtcactgtgcctggccccgttgtctattaacagctgtttagtttatttccttctgtcccctaatttgaaataatgctaaagtgaatatttttgatggatactatcataaactccatttaatcgatgagttcaatggagatttagaatgtgaagtaactggctaaggtcaggcagctactaagctttagagctggtgtttgaacttggggcagtgtaatttcagagcccttgcaatcacaatgctttacaccttctcttccttgttcttagaagcagcttttaacaacgacaacaaataataaaaaaaagatcttactgagtcaggtacaattctaagtgcaattatattgttattattcactaaataacaacctgcgagttagataatgttgttatccctgtattacagtgaaggaaaccggaggtataagaaggttaggaaaggtgctcagggcccacagcagtttaatggaggagctgggactgcccccatgcagcctggcttcagaaccttggctctcattcatgttataaagatgtgactagagaaaagtctctttcatcctgtgctgttgaagatgggtttttttgttgttgttgttgttagttttggcgtatattttctcctactgtaatcttttaaaaatctactacctagcacagactgcctctcccattgttttcttagggggtgtcacttggaagtttgataagcttactgcctactatgtctttagtcagcttgttggtaaaatattaatactaggcaaagccagtctggtgtggtggctcatgcctgctgtaatcccagtattttgggaggccgaggtgggtgaatgacttgaggtcaggagtttgagaccagcctggccaatgtggtgaaaccccatctgtactaaaaatataaaaatttgctgagtgtggtggtgggcgcctgtagtcccagctactcaggaggctgaggcacgagaatctcttggacccgggaggtggagatttcagtgagctgagatcgtgccactgcattccagcctgggcgacagaatgagactccatcacacacacacacacacacacacacacacacacacacacacactaataggtttgccactgaagttgttctttgggtttagtcaacaagtagatacttattgaacacctcctaaatgccatgtaccgggtctaggatttgaaatcaaaagatgaacaagacattgtcccagcttccaagaggtacatggtccacagtgaaaagagaaaccgttttataaatcccactggtgagtgctgaagtaggagtttagcaagagtctgtgggcacagagaggcagaggggctgactctgcctggaagtggtcagagaggcttcacagaggaggtgacattgccatggttcttacagacgtgaagtcatgacaaggcctggcttgcctgaggtcaggaagtgcattgtagcttcaatataggggatgtgttgggaggttagggtagcgatgatgtggataggagctagggaagactaagttagggaatttggattttatcatgtcagccagtggagatgtttaaggaggaaaatgtcctgctcagctttgcctttcagcatgtgacccaagatgtactgggatggagtacgtctcccttctagaaaccagttagaaaacacagaagagtaggccaggcatggtggctcatgcctgtaatcctagtactttcggaggccgaggtggacagatcacttgaggtcaggagattgagaccagcctggccaacatgtgaaaccccgtttctaccaaaaaataaaaagttagccaggcgtggtggtgtatgtctgtagtcccagctagtcaggtgcttgaggtgggagaattgcttgaacccaagaggcggagtttgcagtgagctgaaatcatgccactgcactccagcctgggggacagaatgagaccctgtctcaaaaagagaaagcacacaagagaaaaggggctgcaacccagtaagcgatagcaggactggaaaaggaaagatggatttgggagatcttcccagagacaaaattggattgcttctgtgggtgacggagggagagagtctgaggatgagtactcaagatttatatctgggagcctggctagatagtgatgtcattgccgtttactgagatccgggagcaaattcaaaggggccgtgagttcagtttggtgcctgttcagcagcctgtcctagatccaccaaacagcactttattactggccatttataacaactgcaaatattatctaaatgctttgtcatctcactgcctcctcctttgtcatccctaaggtctgggcaggagactgtgttcatatacttcatagaggtccagaccccttgcgtctggcattcctttggtctataattcagtaaactctgctaaaaaggaaacgagactagcttgctgtggcctcttaagcgacccagggtagcttgtgatggttcagattatgatttgttctagagcttttccagaggcagatgttgaggagtttatcctatttgtccccttccctttaaacaaacaaaagtgccggctggacgcagtggctcatgctggtaatcccagcattttgagaggctgaggcaggcggatcacctgaggtcaggagttcgaaactaagcctggccagcatggtgaaaccctgtctctacttaaaaaaaaaaaaattagttgggtgtggtggtgggagcctataatcccagccactcgggaggctgaggtgggagaattgcttgaatctgggaggtggaggttgcagtgagctgagatcacaccattgcactccagcctgggtagcagagtgaaactcggtcacaaaaaaaaaaaaaaaaagaagtcccaaccccccagttttttatatcctcttagtcatcatagtttattaacagttttgtttacatattgcttctttttccctcttggctagactgtgaaccttgaagccctgtgagcttggtctagtgcctggagcattgtgggtaccaggtttcgagagaatgtgtgctgccagaaagcagatctttgccacctcctctcccctcagctcctgaaccactgccagcagtggttctggaatcaacctgtactttccttctgcatcctgggatgtaattctgggtgattgtaagttggtttatggtctagcttagaattgaggcttctcttgagagagagcatgtgtgtaaatgtttagcttgttctagtctgtggagcattctccttcatagaaaagatgggaaatactggagatgaaaattctccattctctgtcattttgtgtgttagagtctctgtccccatcccagggccacttcctccctggttcttcttatggctttggatgtagcttgaagacatgctcctagcattttcacaagctctgcttgttgtgtttagtgagcgcagactactcccttcgggcctgtcctggctcatgggcagttgctcgtgtctttgcacacatcctttactgtctcagctcttcacttctccctgacatttgtggctgcctcctcctggtttcttctttaagcgattattgtgttttagatgatcagaattcactttttagagacttggaccttgtctttcaaaatgcattcccttttgggatctctgcccatcatactccttggtctcaacatctaaatattggttttttttttctttttctttctttctttttttttttttttgagatagggtctcactctgttgcccaggctgaagtgcagtggtacgatcattggctcactgcagccttgacctcctgggctcagtgatcttcctgcctcagcctcctgagtagctggggccacaggctagtgccaccatgccctgctaattttttaaattattcatagagacggggtctccctgtgttgcccaggctggtcttgaactcctccttctcctttttgtatcctcttagtcatcaagccatcctcctgcctcagcctcccaaagtgctgggatttcagtgtgatccactgcgcctgacctgaatattggtttttttgaagtctaggctaaacaactgtttttgtctcagtttttttttttttaatttccctcctttgaactctgaattgacaagcttacttcctcccaatgtggtgttcttgttattattgtttttgctagctgaagtattttttttttttttaaacataatttactaggtttttcttcctggccagaagtaagttcagggtaatagttcccttccttgtatcttcagctgtgtgagaggtaatgtagagtgagaatttatttatcaggtgccctgctcgtagcagaaggcatgacctcgacttctctctcacagtgaccttgtgtttgtgttggtggcttgaactcactcttgtgtctgggccatttctctcactgtgtaggaaagagtggttcctgtcttctccctggccatgtagtctgctgtgtgtcaccataacaatcatctatcttccggttctttttccttctctcctcacccagttgtctccagtcttaggcgtgtggaattgtgtactgggtgggggatgtgtgtgtgtgggccgccctcttgatttgtaggatccttctcttcctccacattctctgtcaactctcctccaccccctgtgagatctgtggactcaggtatacgttgctgtgagtctcattctgctcagctggggtgatgaaggtgagattgcttttgtcgcttcaaagtaaaattttagatttgctttggcagccgcacagggtcgtatgcatgggggctgcttaggccagaggcgcagtgttcctgacctccttccgtcttactttctcttgctagtttgtccatctctgtggattttttaaagtagatactagatacctagatactactaagaacatgatctttctcttcttgccacttggattttagcttaaagccaacttggaacatttagggtgtttccttcctaccactgtctgcctggtctcctagggaaagatgccttgtatcttgttctggtgtacagtctgcccatttaattggtaagtgtttattgtgactcttctctactgggctctggccccaggcctgatgcgaatagggcaggcctgtgaacagagcaaagacgagtcacttaggaggggacgagagaggccagcggtaaactaatattaccagctcagggtttatttgtcaaagcctcctttgctgtgaataaaaggttagatctgaattgggtctgagtcctggctttattacctactagccatgtggccttgggcaaattattaatacttccttgggccttggttgccgcacctgtacgatggagtcagcaatggatcctgttctgtagggctgctaggaagcttaaatatagcaatatttgctatatataaagtgcacctggtacataattgatgcggttgaaatgaaaattcctctttctctttcagtgccatttgctggaagaaacagaagaaatatctctgtccccatctttcagtttcctacccaagactcctgtgtggttgacatcactgctgtgtgcagtgttcatgtccatataagtcagaagtggcttgcagcagtggtttggggctttggggcctctgctcgctccttatcaattcttagggttacatcctctgggaagatgccaggcctggtcaagtgtggcctctgacctagagttatgcaaggcctctcttcctcctgtggccagtgtgaaatttctcatctgtgctctcctgcctctagcaggaaggttggcctacatttggggcacatctctgtcactgtctcaggccaggggttcaaatataagacctgaatcatactgcacctcagaacccaaacccttttacttaattttttttaaaaaatttcattcagatggtaaaggttcaaacaatacatagagatataaaacagaaagaaaaaaaaatacacgcctctctctagtacctattccccagtagtcaacactgctaccttttttttgcaggggaggtaaattcctccagaaaaaaacttaaacatctacaatttcatatatcctctcccctcttccctaaaaaacaaaacaataacaacaaaactatagaaatgggattatgctatatattctgttcagtacttttttgtttttgaaaatttaaaaaatatgcaaaagaagaaaatgtcatccatattactaccacttataattaaccactaattaacttttaggtgtgtttgcttcttgtctttatgaatatactttaaaagctacttaagtaaggtggaagcagttctgtttaaaaaattaggatgttgcccgggcgctgtggcttacgcctgtaatcccagcactttgggaggccgaggcgggcagatcacgaggtcaggagatcgagcccatcctgaataacatggtgaaaccctgtctctactaaaaaatacaaaaaattagccaggcatggtggtgggcgcctgtagtcccagctacttgggaggctgaggcaggagaatgacgtgaacccgggaggcagagcttgcagtgagccaagatcatgccactgcagctccagcctgggcgacagagcaagactccatctcaaaaaaaaaaaaaaaaaaaaaataggatgttaaagataaagccaaagtattatatcatcttggtccttatctgctttcccatttaatagcatcctgctctccccgtcgccgtggatggggagctgcctctttcttctacgacaccgcacgttttccattgtatggatttgctgtcatttcatttatctgaccaccctcttattggtaggcatttaggttattaccagtttttttgccattaaaatgctttatgaatataatgtgtaggatggtttcttgctgggtaattactgggtccaaggtttgaacatttacaattttgatagacatggccaaatacctccccaaaaatactagtttatttctctaccaactgaatgtgtaagagagtgccttttctccccagatctttgcataaacctgggagttttattttggtcaaacattaaaattttttttttgccagtctggtgaaattatcatcttttttataaacatttctctttgagctacactgagtgtcttccattcagccatctgtgtttctcttgctttgaactgcctgttcttatcgtttggccatttttatattaggttgttgatcttcaacaattgatttgcctgagttaagttagccttttatccatcatgtgttggaaatattttaaagatttgtcatctacagtgcgatttttaggcctcttgactttttgttgagccctaggcttttgtgactgcctgtgacagctctggagagggggccgacaggcacagtggcccgcagtcgagccaggccccatcttctgggcagtgacgcgtggttgttttaaggcttttggtactgggattccccgttgtaagttttagctttgttttgggtagggacttttccccatcatattaatgaacattaataacaaatagagacttgcttttgcctcccaaccaaatgtttgggaatgtgtgcacccacgtgaagggtctgtgtgatatctttatctcatcaaccttctaaggcttttaaaacctgttgttagatttatgtttagatcatggttctaggggagaaccatcgtcactcctcattgagctttgcagaggctctgaaaggaggacatactctcttccccaatcaatgtagaggaacgtcagtagttcagccaagattgctctatctgccacctcttatgcttccaagctgggctaattgagaagtgtgacatcttgctccagcctataagcagctgtctgtaattttgagagatgagaaggattctcccttaaaccattgctgcttttgtggcagcatcttatttctttcctttgcagcacaaatcacagtgtataattaaaactattttctttgagcttgtttttggtgtacctcctgcactaaaatgttaagttctgtggcggtcacggggcttatttgtcatgttctctattatacccttggcatcctctaaaccagtgtgtggcacatgctaggcactccggggtttcactgagtgatccattctgttaggatgggatcaagtgctcatgtgtctcctcctgtgtccctctctggctccagatcttccacctggcagagtttccggaagccccagagatatgctccatggccatagggcctgagacgtggatggctgccctctgactaaaatttagagagctaagcttgtctctttaaaaagtaacatatactaattgtaaatcacctagaaaatacagacataataaaggaaattaaatctgtgattctgtctttcagagatcattaccattaacaactcattgagtcttaatgcctttattgtttttgttttgttttgttttgttttgtttttgagacagagtctcactctgttgcccaggctggagtgcaggctcactacaacctccgcttcctgggttcaagtgattttcccacctcagcctcccaagtagctgggattgcttacaggtgcgtgccaccatgcctggctaatttttttgtattttttgatagagacaggctttcagcatgttggccaggctggtcatgaacttctgacttcaagtaatctgccccccttggcctcccaaagtgctggggttatagatgtgagccactatggccagcccctatgcctttattttttttatatacagatccaataaatatccatagagcactgagtttatgctgtacataagggtttgtaactttcagttaccatcagacatgttttgataatgaaatttaaagaaagtacacattgggatttgggatgcagaagaaaaaataggatagtattctagacaatgacagtgatgatacctgagaatctagtagacactcaggaatccacatttccccatttaatattcatctgaaacaccatttcagtggctgtagattgtgtagctaaactcacttttacataaaacaacctctgttacttatctctgggccttaagtttgtgatatagtttggatgtttgtttctcccaaatctcatgttgaagtgtaatccccagtgtgggaggtggggcctggtgggaggtgtttgggccatgggggtaggtccctcgtgaatggcttggtgctgttcttaagatagtgagttcttaggagatctggttgtttaaaagtgggtggcaccccacccctgttgctcctgctcttgccatgtgacatccctgctcccccttcaccttccaccatgattgtaagcttcctgaggcctcaccaaaagcagatactagtgccaagcttgtaccagctgcagaactataagccagttatatcttttctttacagattacccagtctcaggtatttcttaatagcaatgcaaagtagactaataagtttgttagctatttctagtaaaggtaaataactcttgagatgtatattttcttaaagatacgtctatgattaatacctgaggatgaaattctaaaagtagaattttaacatcaaagggtttgcactttaaggcattttcagcctccatttctggctgttgctgttgtggacagtcttgggcagattttgaactctttgccttactgtggggtggtggaaaggaggctttaggagcagccagagcagggttcaaactccagccctgccagggacaactggccaaaaggtcgtgaactaatgactcagtgagttttctcatttataaaataggatgtttcctcccagggtgggggtgaagtgggtgagatgacccatttgaagcacagtggacccttgaacaatgcaaaggttgggcagtcaattcacataaaacttttgatctgagttgggcagatcacctgagattaggagtttgagaccagcgtgaccaacatggagaaaccctgtctctactaaaaatacaaaattagccgggcatggtggcacacgcctgtaatcccagctactcgggaggcagaggcaggagaatcacttgaacccgggaggtggaggttgcggtgagccgagatcgcaccattgcactccagcctgggtaatgagagtgaaactctatttcaaaaaaaaaaaaaggccaggcacggtggctcatgcctgtaatcccagcactttgggaggccgaggcgggcggatcacgaggtcaggagatcgagaccatcctggctaacacggtgaaaccccgtccctactaaaaatagaaaaaattagccaggcgtggtggtgggcacctatggtcccagctactcgggaagctgaggcaggagaatggcgtgaacccgggaagcggagcttgcagtgagcggagatcgtgccactgcactccagcctgggcaacagggcgagactctgtctcaaaaacaaaaacaaaaacaaaaaaaaacaaagaaacaaaagaaaacttttgattcccctagaactactattaaataatagcctactgttgacccgaagccttactgattacatagttgattaacacatattttgtctgttgcgtgtattatatctttattcttgaataaaataagctaaagaaaataagcatcgttaagaaaatcactttgagtaggctgaggaagaggaggaggaagaggaagggttggtcttgctgctgcagggctggcagaagtggaagaaaatccctgtataaatggatccacgcagttcaaacctgggttgttcaagggccaacagtacttagcagccatttagcacagagcactgccagcccccctcggcctgcagcctgctccagcaccttgctaagaggttgctgaggctcacctgcagcagctgccctcccgagtcctctttcctttacacccctcagagcacccgggccagccatcctccatgtggtgcagcagaggcgccggtggtccgggaaccagagtgggtggccctggcctggaggcacggtgggttagtgtgtgacacacgtggctttcccccgacccccagctgcctcctgggagtgaagaggaggtcttatttgccaacacataccgcaccacacacccacaacacacttggtgccagaatcagccttttgcatcgctcttggcgctgaatcagagtctgtcttggggagggatgtcttccttctctcattacatgcgcccagcttaggtggtgtagtgagggagtgtacagggctgggatgccacagcctgctttcctccccgtgtcctggggtcccccgtctgtccagtgcccagagctattaataacaccttcattgaaatgggtgtaatggaatcccagttgccccccccagtgggactccaacacatggggagtggggagcagaataataatagcaaacacggatgcagtacttattacgtgccaagcgttattcttagttatttacatcatgcacatctattaactcatcttgtatagcaagcccatgaggtggggactattactgtcctattaatgggtaagggaaccaaggcacaaaggggttggaaacttttcccagttcacatagctagtgagcagtggcgcttgtgaagggggtcctcctgagggcctggggcctgctccttcccagtcttgtcttcatgtccaccttgctgacgagtggcacatcaggccctgggtgccggctgctttcctgtcctctggctcagccaggcttctaatgctgaccactcctgagtctttccacgtggctccacaatggcagacttgcaggaggagatgaggggaaccatgcataccttgaatagggggaggggtcctgtccttcttcccctcaggtgctggaagagacagagaggcatgggactgtatttaggcagctcccgcagctccctcactgccgctgtcctagagcttccttcccaggcaatgcgctctgtggcttgggcccctgcccctgccacagttggcagggggccttgcctgtggcgttgcagctgagcacacgcaatcattaaccttttctacgtgtaagagaatttcaggcacaaactgtggggctgaggtgagtcacaatgttggaccggggcttagtttgggcttaaaatatttcacaattcctccaggcattctttgactaatgatctatggctttttagtgggaagacccttccttcttctagtctccagtcctcagagcatggttcagggcctgttggccttcactgcccatggccatgcccatgcccaaggagcaggggccttggcttctgggtggacctgccgcctcgctctgctggtggcctctggcagtgccctaggagtcctgctttccttccctgtctcttctttggcttggagtgcaggccacctcccctgctgttctttacttagccctgtactccagattagcacattcttggtttcctctctccaggccttctgcgctccacacttgtccacagagccactttggcacttcagggctgtgcccccaggacgtcagccagcctgcctcgcccatctgaagggctttcattgcttgggttgattttcttatccagtcagggatttctgataaacatgtgcctggatggatgtcaatgaccagtcctttttttttttttttttgttaaatttaatttaagttctggaatacaaatgcaggatgtgcaatgaccagtcttcatgggaaattcttgctaagtttctctaagaaatttaaaatactaccttttccaatttatttcaggatggaaaggacagctcaccctcagtcactgggggagagagtttagtagggagaagaagcaacagaatgagggggtgttagctcagaagttcctaaccactaggtgagggaaggaagaggggagggagtaaacagaaatcaaattagatcttgcccattagaaactcagttaggttgggcagataaggcataaatatgcaaaatggtaaattttttcaaagtggaaactaccctatatagagtttctgaagcaccttcaaggatattatttcacgaagttgaatctaattttacagatgaggaaaccctttccagaaagataggtgggcttgcatgacacaagctaggaagtgcagaactgggattcaaaatgcatgcgattgcaaagcctaggttcactgtgctacatccgtctcctctaatgggtagagagtttgtgcaagtctggaagtgtgatgtgaacctagcccttcttgcacaaactctcctttgccttgtgccacgcactcctaacgtgttcagggcagaaagtgcggaagttgcagtgagcgcttggaattcagggggtgctaaggagcatgcatttagatttggatcttggtgcatcctcacttagcacagctctggttggcagatgtcctggtggtcgtcactgggctgaagacagaaacccagcctacaatcttggtgataacttgtgctggttacatccacatgctccaagctcaactcagtggtgacggaggaacccccctgtactgtggcattaatggtactggttgacagtgatgaatgcctttctgataataaagcacttttagaggtattatttcattagatgctcataatgtttctatgagggggaggctaggcaggtatcatcgctcctaaatgcatgtggcacaggctctgaaaggtagacctctctgtgaggctgtgcaagaagaaattgacaaatttcagactgggccaagtcttccctgattgtaactctacaaccaggcattgcttctgagtaaatctgacaactttgattcttctcctctgggctccagttcctgtgtgcctgtagggggcgatcgaggttctttctgcttggctgctctggaaaccttgttcctcctgaaccctttgaatttagcactcttacagcatgtaatctcactggattttaaggattttctgtgtctcccctcatatcttcttctgccccccactagcctaggcttttccagatcaggactgctctatttggttttgacattcagtgcaatgcatggcccatagtaggagctcagtaaatgcttgctggattgaattatatacaaaggaaattggccagtgccttctcttgctccccttagagcatgggaaagtaaacttttttcctggtacatccaaatgaatgaagttgaaggctgggcatggtggctcacacctgtaatcccagcacattgggaggccaaggtggggtatcacttgagaccaggagttcgagaccagcctggccaacatggcgaaacccggtctctactaaaaataccaaaaaattagccagacgtggtggctcacacctgtaatcccagctactcaggaggctgaagtgggagaattgtttgaacccgggaggcggaggttacagtgagccaagattgtgccactgcactccagcctgggcaacagagcgagaccctgtctcagaaacaaacaaaccctaatgaagttgaaagtggcagaactcaagacccatgaggtgtcctcatatggccacaaggtggcagtgtgacctcctgggaaccttgcctcctgcaactattggctccggccacctgttactccatgggagagaccgagttatctagtcattgattccttctagtcacctgtttggggaattgcctctgcaaagtcagtctgagaaatcttggcttccagcctcctctaaaagctgggtggtgtggtggaaagacttggtctttggagtctaccaggcctggattccaaccttggctctgccttttctcagaaacttagccttgggcatgctacttctctgagcctcagcttccccatcctgtaaaatggcaaatgtacagttaggaaaaacccaacatatcatgggccatagcataaatgtatgccagcattcttgttggaaatgctcatttgtccttcccttccctctgcaagctggctccatcatggccatctgatcttatttgcaagcttcagacactttccagcaggttcttaggcctccctgctgtatcaccccagctccactccatctcggtcagtcagcacctgcttcccacgtttccctctgccttcatgccttccctctgcctgtccatttccttcccagcatgtctcttggacaccccagccctctgaatgtccaaagcagttggagtgtggactgtgtagggctcatcttgacttcccatgaagatgctaaatctgtgagtgtccttgtcttaattattttggcacctgcgcttgcacttagacaattggtgataaaaatgacagctattagtgagtgcatgtcagatactctgtgaggtgctttgtggaaatatttcatttaatcctcacaacaaatctgtgaaacagaagccattatccatccccactttacaaaggaagggtagatcaggatgcttttggctccaagcaatagacaatttcatgaaaagcagcttaaacagtaagaagagtttattatcttgtcaaaaagaagtactgagggatccctggtgatggcagcgaggatccaggtgattgccatttctcctggttgccttcctcagtgcattggtttatcctcttaggccccccttactggtaataatgtgactgtcatggtcccaggtgccatatgcaggagagatgatgtacatttcttgtgctccctttaagaagcctcttagcagatttcttttttttttgagatggagtctcgctctgttgcccaggctggagtgcagtggcgtgatctcggctcgctgcaagctccacctctcagggttcacgccattctcctgcctcagcctcctgagtagctggggctacagtcgcctgccaccatgcctggctaattttttttgtattgttagtagggacggggtttcaccgtgttagccaggatggtcttgatctcctgacctcgtgatctgcctgcctcggcctcccaaagtgctgggattacaggcacgagccaccgtgcccggcagcagatttcttacaaggctcttggccagttgagttgtaggcttgttcccaagccagtcactagcaaagggactggaattaatgagactggcttagacaggtcaagattgaacccctgaggctggtgagaagccagcctcctttaatacccctagccaattggtccagggagaagaaggggcatcagtgaggttcgacgagttaagtaacttgctcaagcttggaaatctagtaataactggattcatactggcatccggctgacttccaaggccatctgttgccaggttgaagtcaactacagaggtagagagaatattgctctggatttgttgtgctgggtctgagtaattgctgaggggccttttcctatggactctggagtctctcttctctctagccccctttccaatactgtattggtttttctcagtctgcctttctccccgaagccccttcaccccctgcttcccagtacctgagtgctgcctgccttccacagtagactttatggcctaagctggagacaggtctaagctggaccgaatggcctgagggctgatctcagtgtagctgtcaaggccccaagagagtcatcatgagatttcatatagagcagataaggaactgcagaggcctcaggaaatgtgccaagggggctggtggggggggccagcaggagtggggggtttgtggtatgtcggtggcgatgtcagggcatgtgggccaggggcttagagcaggcccatgtgacagcgcagttactcagaaagctgtttggcctgcagatgcttcaggactgccccaaggcccgcagggaggtggagctgcactggcgggcctcccagtgcccgcacatcgtacggatcgtggatgtgtacgagaatctgtacgcagggaggaagtgcctgctgattgtcatggaatggtaagcagccactgttctagtcccggcccagcctgttcccactcctcactcaggcaccttaccctctgaggacagcccagggatgggcctgaagcctggaatgtaaacacttgattttttggggggcagtggagagtggcggcgggctgttgtgttctctggatctcactgtggcttcatttcagtttggacggtggagaactctttagccgaatccaggatcgaggagaccaggcattcacagaaagaggtagaaagggtctgttgtgggagcacgtgcaggcaggcagggcagtgggggtctgaagggggcctttgcagtgcctgctcttggggaagggtgctgaggctgctgccccctccagcatgctgcaaggggtgcctcagctgaccagggaagctcctggtggctttgtttctggggtgggtggtggctgtggggagcctcaggctgcacagaggtgggacccggtgcactgggttttcaagcctaatgatgtgtctttgtgactttctttcccactcactcttccctcccctctacagaagcatccgaaatcatgaagagcatcggtgaggccatccagtatctgcattcaatcaacattgcccatcgggatgtcaaggtgccagctgttcataaccctgagcccgagtgctgtggggggcaacaaaggggctgtggccaccccagagatggttgccaggccaccctgcgtccttgctgcctggttcctgagcatgccattctctgccttgtagggccttgccctctctgcccatgggcaaacccctaaacccagtagtgaagcattctctggccccactcagccctgtggttctcctcaggcagaacccctcagtcacactcttggtttctctgttcctgtggtgtttactgcgggttctgtgtgtcagtctgttatctccaggcactctggaaaccctgcagaggcaggcacctgcccatagagagctgccactcctcgtggtgggcagtgcccaggataggcaaatggttgctggatgagtagaggaagggaggaaccaggatccttttcgtttctgatagcccctcccaggtccagcagggttgctatttttctgtctctctttctgtagcctgagaatctcttatacacctccaaaaggcccaacgccatcctgaaactcactgactttggctttgccaaggaaaccaccagccacaactctttgaccactccttgttatacaccgtactatgtgggtaagtccacagggggcccagggacctaggcttttcccagaacttttctcagcccctcctcttggctatctggggggccgcaaatcctaggagagttgtgtctgtatggccccttctggtgctggttctgctgggacctgctgagaagtagggcttgtcagagcgaagctacagttgagaaattgtaggaaaggatctgctgggatctttctgagaagagccatggtttccatcagattctccatggagtctggacccaggtcttgttctggagccacagctgattggcatggaagaagctttcaaagcatgttcagagcatctgtgaaattaaatgaacggcatgggcctgaaagtctcatgcagttcaggatttttagaatcttaagctcctagttccaggttcctcatggaggaggatgttctgttccagtccctgggctgggctttggctcttccttctgtgccccaactgctgccacctcatgataggctgaaaggttgggatggggagcatctttcacagagaaactgagtggatcacagggttctgagggccggcccacccatgttgacctttgatttgcagctccagaagtgctgggtccagagaagtatgacaagtcctgtgacatgtggtccctgggtgtcatcatgtacatcctgtgagtgtgctggggagggggctgggtggggcagggagtcagggcggcctgtacttctccaggacaagaggaagaggcagacgttagcattcccctttgtacaggggagtcccctgcgtgccccttctctcagttccgatagctaagtggcgggtgtaaaccagctcatgggctggaaagtgtgcgccttagatacttgctatgctggattcccgggccccgggcttgactttgtatattgtgcctgtgtcaataagccctgatttctctgtgacctttacaaggagaagagcctgtttctcatcctgttcctggtacagggccactaagtgacagctgttctgtctcccacttccttcctcctgttgatgcaggctgtgtgggtatccccccttctactccaaccacggccttgccatctctccgggcatgaagactcgcatccgaatgggccagtatgaatttcccaacccagaatggtcagaagtatcagaggaaggtaagaacccaggctttcaggacaaggggaagagcccgtgtgtgtgtgtgtgtgtgtatgtgtgtacacgcagacacatgtatgggcctccatctcatgtgcgtggtgtaactgtgggttagcacctatgcccacgcctgcggggtgcgtcctgcttcattttgcctgtgtggagggctggaggcagggccaaggctgtggggctgtgcagggcctctcaagtggtacagccgtaatggtccttggggccagttgctccggcagcctgcctccatgcaccccctctttgaacctggtttccccatgaaaactggggaaaggagcaggccagggagagtgacccctgagctgtcactgccccctgtcccaccccacagtgaagatgctcattcggaatctgctgaaaacagagcccacccagagaatgaccatcaccgagtttatgaaccacccttggatcatggtaagctcggcaggctggggagccttgggtctcacgggactattccacaggacagagtcttagccaggaccctaccccaggctttcactcggaccccttttctctcttctcagcaatcaacaaaggtccctcaaaccccactgcacaccagccgggtcctgaaggaggacaaggagcggtgggaggatgtcaaggtgaggggcaccactgggtgagaggggctccaggtggggtgggcggcttgcggggagtgcccaggtgtgaggcgtggtgctggtaggggagagcttgattctgcctctctcatcccaggggtgtcttcatgacaagaacagcgaccaggccacttggctgaccaggttgtgagcagaggattctgtgttcctgtccaaactcagtgctgtttcttagaatccttttattccctgggtctctaatgggaccttaaagaccatctggtatcatcttctcattttgcagaagagaaactgaggcccagaggcggagggcagtctgctcaaggtcacgcagctggtgactggttggggcagaccggacccaggtttcctgactcctggcccaagtctcttcctcctatcctgcgggatcactggggggctctcagggaacagcagcagtgccatagccaggctctctgctgcccagcgctggggtgaggctgccgttgtcagcgtggaccactaaccagcccgtcttctctctctgctcccacccctgccgccctcaccctgcccttgttgtctctgtctctcacgtctctcttctgctgtctctcctacctgtcttctggctctctctgtacccttcctggtgctgccgtgcccccaggaggagatgaccagtgccttggccacaatgcgcgttgactacgagcagatcaagataaaaaagattgaagatgcatccaaccctctgctgctgaagaggcggaagaaagctcgggccctggaggctgcggctctggcccactgagccaccgcgccctcctgcccacgggaggacaagcaataactctctacaggaatatattttttaaacgaagagacagaactgtccacatctgcctcctctcctcctcagctgcatggagcctggaactgcatcagtgactgaattctgccttggttctggccaccccagagtgggagaggctgggaggttgggaggctgtggagagaagtgagcaaggtgctcttgaacctgtgctcattttgcaattttatcagtaatttgacttagagtttttacgaaacctcttttgttgtccttgccccactcctctccaccagacgccttcctctctggatactgcaaaggcttgtggtttgttagagggtatttgtggaaactgtcatagggattgtccctgtgttgtcccatctgccctccctgtttctccacaacagcctggggttgtccccgctggctcacgcgttctgggagctcaaggccaccttggaggaggatgccacgcacttcctctctcggagccctcagacatctccagtgtgccagacaaataggagtgagtgtatgtgtgtgtgtgtgtgtgtgtgtgtgcacacgtgtgtatgagtgcgcagatctgtgcctgggatcgtgcatttgaggggccaggggcaggcagggctgcagagggagacggccctgctggggcttaggaaccttctcccttcttgggtctgccctgcccatactgagcctgccaaagtgcctgggaagcccacccagattctgaaacaggccctctgtggcctgtctctattagctgggttccgggaggcagagaggagtgaccgggcactggcactgcgatcaggaagactggacccccagcccccagggcccccctccccccacttagtgctggtcctaggtcctctgaggcactcatctactgaatgacctctctacttccccttcttgccattattaacccatttttgtttattttccttaaatttttagccatttctccatgggccaccgcccagctcatgtaggtgagcctgggcagcttctgttggcagagcttttgcatttcctgtgtttgtcctgggttctggggcatcagccagctaccccttgtgggcaaaggcagggccacttttgaagtcttccctcagatttccattgtgtggcctggtgggtcagggggagtctttgcaccaaagatgtcctgactttgcccccttgcccatcagccatttgccatcaccccaaacaactcagcttcggggccggtgaggggaggggcctcccccagcacagatgaggagcagctggggtaggctgtctgtgccatggccccccactcccccttcccttggagggagaggtggcaggaatacttcacctttcctctccctcaggggcaggtggtggaggggcgcccagggtcgtctttgtgtatgggggaaggcgctgggtgcctgcagcgcctcccttgtctcagatggtgtgtccagcactcgattgttgtaaactgttgttttgtatgagcgaaattgtctttactaaacagatttaatagttgagagtttttctttctctttcttcctggggctcaggccttaccccccaccgcctctatgtgcagaggggttttgttgggtggtgagggtgtgggttgggggtcctgggagaggagcggagggcctcctgggcgagcaggagccagcacctcattggtgaggacctgggcaggatgtgtgtagggcatccttaaagcaggacagggaggctgcaagggctcaagcccatcttcttttgccaaatgcagaatcaggagccaagctctttttggcatatgattctttgacctacatagccaccaccaggtgctggcacctttagcctgcgaaagccagctggtatagggtccagggaagagggggtgctggtgaatttggttgaaatcctggtaaagataccaggggagcaggttagtgtagtaccggcactctccaggaggcggtgataggggtcaggcagaaaccaaaggctctacctcggagctagaagagacttcatggttcctgtggcccattctcagtgcacagatgagaagactgaagcccagagctggggccacatgatgacttgacccgcagcagagcctaaagtagaaactgggctacctgccccattgcagtccctccgggtcagatgggaaaatagcacatccttcactgtgtcacccgcattttcttatgtgaccctcagagctgccagcaagagacagtacagggcggctgctgattgctgttttatgtgtgaggaaagtgactgagaaggtgggatgatgtgccacagttgcatggtgggattggaactcagatccctctccccgctggaggagagacctgcttgtcccctttgctgccagaaggaccatgtctccaccctcagctcctgggaacagcaggccctggacctccccttcatgacagtgggttgctgaggttggttctcgccttgagacactactcatcactctaaaatcacagctcaaaacaaaccagcatgggggtttgctttcagagaaatccacttattttgtctgcacttatgaaggtgttagaagcaataacccaagaaggaggaataaggggtgctaggagggagtcagggagagaaggagaggaagttgtcagagttctgctatctttagaagctgttattagtttcctgttaacaaagcttctgccatattaattttatggcttaaaacaacacaaatttatgatattcctgttctgtaggtcaggagtgtgatagggtctcactaggctggctggagtccaggtctcagcagggctgcattcctctttggagggtgtttccttgcctttatcaattctaggggcttcctgcattccttgggtcatgaccccctttctccatcttcaaccgcaaccttgcatttttctgatccttctgtggtcacttctctgacccagctggtgtgataagattgagcccactcagataatccaggataatctcctcattgcagggcccttaaccgtaatcccatctgcaaagtcccctttgccatgtaagggaacatagccacagtctggggaccaagacatgggcatcactgggggccaggattctgccacagaggcccgttgcacagccttcttggcctcatgcccaacgttggcccttgtgttttgcttccttccctgactcagcccatttcaggaggatgcttttgtggtcagcaaggattcaggctggggttggctttcagggaaaatggctggggcgaagggccaggaggggtctggcatggttagtggggtcttgccacagcttttcacccccatgcccatgtccctgaccttccatgctggcatggccctgcgagtccctgtctctagggagagcttaacacctctgctaaatgcctgggtgggatggcaatggaaacttttgtccctaaaggcagatgctggcttgcatgggttcaggagcaggtgtgcttcttgaacacccttaagtagtgtgagatgtaaagaggagcatagagacactcctgggcccctaccaagtaccgatgctgggctcttcccctccatctcttcattatcagaaccctctgaggtagtcagtctcgtttccagcttacctgtaagaaactccaactcagaggagtaaagggactcgcccagcatcacacagctagtcagggattctgacctggatctcctgtttccaagtttagagcttctttaagaaagcccatggacatcgtcttggtaagggagtgcagagggggcggggaggagaggagatatgaggctggattccactccactgaggaaggtctagttttctttgctatagaatgagggtgatagtcctaggcctgtggctgttttaaggattcagtgagatggtggatttatttatttatctgagacagagtcttactccatcacccatgctggagtgcagttgtgtgatcttggctcactgcaacctccgcctcccaggttcaaggaattcccctgcctcggcctcctgagtagctggaattacaggcacataccaccatgcccagctaatttttgtatttttagaagagatgaggttttaccatgttggccaggctggtctcgaactcctgatctccagtgatccggccacctcagcctcccaaaaagtgctgggcttacaggcatgagccactgtgcccagcctagatggtggatttaaatgcttcctaaaatgccagctgccaggtggcctttatcaccaggagggtcccacccctcagtgcgctgctcagcagtgggagcacagggagccccaggcttggagtcgagtcagtggcctaggcctggtccacgctcctgccctgagcttcacggcgggtctctgtgccttggggtgagcaggcagttgggttggtaaacaataacagtaaatttggggttttcctttgactgggttggagacaggaaatgcaggaggctgtgagtgacgagtgggtagagtgggtagcaggtaggtcgggtaggtcgggcctgctcagggtgtgaaggaaattcagttattcaagggaggagggtgagggtggtgaggctggggaaagtggctggcccacttactggtgaatataaacaaaccctctgggcactccccaggtggggcagagtggggacaggggaggctttgaggggcagccaccgcatcctcagccctgagaatgcagctcctttcgggctctgtctctggaagcctacatttaggggctccagccgcccctgggtccttttgctcacttcatcttcctgtcgtctccctgcactcagtcagaacagtgtggctccccagcatactcgaccactagataatccaggcacttggtgtatgtcctgtgctttgggagaaacaaatgaagtgtagggcacagttcctgcccttgagaacctagttggggagatacaaaatgcctgtgtgcagcagcaagtggctttgtcttccctttccctgtacccacaggcctggacacattaggggctgttccagactgagaacaatgtgtcattcaagcccaggtggcatagggcagcctcttagggccccagaggttttcagatgagcatgagtgaggtgaaaaaaccaaaatgacaaaataaaccacaccctggatcctcgtcctctggacgaagatctcacatctatgccttgttggggaggatttcagtcctcccccacccaggcatgtgaagattaaatgaggctgtgccaagacttggaaaggtgggggaagtgcaactcgtgtggaaagataggactgccccctgggctctgggccaccattcagacaggtcagtgccttggccttttcagcctaggctgctctttaaaaagaagaccttcagccactatccaagagtaaaaatgtcacattttcaacattcagctcatcttgagcacctcctctgtgtcatgcccagtgcttaggacttcggagacacacagatgagtccagaagtgggtctagcctttgtggagctcagcatagagaagtggcgggcatcgctgtaacagaagaactgatgctctccagaacaggagcagaggtggttggagtgcataaggtggagctattctgttagagacccaggagagcttcctagcagcccttcaagctggcacctgactgacagttttgatggcagaaaatggaatagcatgatggagatttccccattgcatttctgctctcacttctctctgcaagagctagatccttccttctccaacaggttcacccctcctgtcttgtggtctgaactgctgtctgtctgctcatctcgttagcttgacctttgacccctcatgggttctgctcatggaaatctgatttactcctctctgtggggtgcccttggtgttttctgtccattttccctttccagcccctccaacttggatttgcctcataaatgatgtttgctccctgaaaaacaaaatttggggatgtgggctgatggggcttttgccacgtttcactcaattcattaattttttaaaaagtgttacagtggtacaccttaaacttagatcttttgtagttaggcactttctgaatcatcatggaaaatgatgacattacatgaaattgagagccctcctggaagagcaggatgagcaattgttaggggcttccttgcccctcttccctctgccactaaaaggcctttctcatccctttgtcctcatggttcttactccactcagtttaaaagtggagcccttgggagcctccctggcactcacacacaaaaatgtcaatatacttggcgtccaccctttccatttttaacacaccaccatctggaacccagaattaccttggaatttacttgtctcctctagagggagtcataattgcttggaaggtaagttactgcccagagcctctggccaggaagtcttttggctgtcaagcctgcaggatttcaggtggggctgccaaggtggtggaacctgtgtttgataagtcatttttagggaccagggctgccatgcaaatgcatttgtttgcataactttcttgctctcagggacagtaaagtttcctactgccatcccacacccctgccaggatttgcaagtgaaataccaggactgactttccactttcccccttcatgagtcctcccttcctaagtcctcccccaccccttggttttggttttgtctctgaggtcctgtgtgaccaaatactagtctcaacctctctgatcctagggtagtagtgtttccaggaccctgatatgcaaagtatctgtacaagttatgcaaatgagcatcctgtctgggtggctctggtcctagccccgggcagttactagctctgactactgctgtccgagtgtgtgaaacgtgatcttgctccttcctctgtccaggcagctgtgggtctcttgttcctcaaacagctactgcctcttggggtaataaggcctcaagtttcagaatgagctgagttctcctagcccttaccttctgatctggagacatgtggttctgaattcaccagtcaaaggtttacttttgaaagaaaccacgatctcatctaagtctaagacagagaccttggttagctggagtctgtggtgcagagagacctggtatttgtagtaagacctagaggggcctttggttttctggcactcagctgtctccttttctggtcacaaacctattctaaggaaatggtcctcatagtgagactctagccctacccacccacaggagggtcgagggcaggaggggaaggatgacagccaggcattctttgagccagtgtgcaaggaagagaaagggtagacgagaaattcagtctgatcggcttatttcaggctctgaaaatgacagctgactcagggtaggtgcttagtatctgttggatggatgaaagcatctaaaggaaaattaacacaagtaattttagtaactcaaacaagacattatatgtacatatatagacatacagagtgaggcgtgaacctttctctttataacgtctccacctcagtgatgccaattccctctccagaaaaaacttcattgaacagctttattttttttgaaatttttatccaaaaagtttctgaaaatttatctagatacaaatatacttataagcacaactgagaagtttctttggcagttataacaagtacaaatggaatcattaggcatattgttctgcaacctgcttttaaaaaattgtgataaaatacacttaactgaaaatttaccatcttaaacatttttaactgtaaacttcactagtatgttcacattgttgtgcaactgacagactttttcatacccatgaaacaacatacagcttgcttttttcacttagcatatcttgtgaatttccatgatcaaactcatagaactatcattctttttctaaatagttgcagagtattttatagtatgatgtaccacaatttatctgctgtggatggatatttctcacctcctttcttttttatttgtcttttaacctcatttgcactgaaggactaccctccccccctttttctactatttatatagatctcacaaatatcttgtacagtatcttcgagtgtgtgtgtaaggatttctgtagtatagatccctagtagtggaatggcaagatctaagggtatacacattttagtttttgatagggactgccaaaaagacagtatcgatttatgaatgaatgcactttgcatattgctttccaagtgagagctttacgaaagggtttgctgtcagcagcaaatctgggggtagagtcagtcagccgagagtaaaagggcatttatagcacttcccaaaactgatagatgtagacccttggccacattgtgggcgagtggaaaagtcagctgtagaggggtttaggggattccttcaacatctccccatatcagtggccctgctcactcaattatggttatttgcatacattttgggcatgtaggcagaatggctcaaagacaaaaatctgaggttcagccttgtttggcctcctggtgtttgatcttgaccgggctacctgcttctctgactggcatgcaaatgcctgtgggggatgacaagtgtgcacataacataagtgacataaggctgactctggtgggtgctgtaagagaggcccagagtgctgtgggaagttacagaggaggcacgcctctggttaggaatagcagggaggaggaggcggctttgactccgggttgtaggtgttgtggggcacacaggacacatgcaggacccactatacaggagctcactagacaggagctcagccacattgcctcccaatgtgacactgattgtgtgcccagccctctgctgggtaccgaatctgaggcatcagtcttggggatggcttgggatgtggtggtcagtagctcagttgcatatggcacaaagataaatctttggagttactctaagctgggtcccaactatgagcagatgacttgtcctctctgagcctcagcttgtcaaccggtaaaatgggaattattattgaggcacccatgaacatgtgccccagagacctcctattatggggagcttatttgtccaagggccccagctatggcactctgaaattcattgtctcatttgtgtggaggccacacttcctttctcgtgctcccagtcaatgacagtacaacagggatgtgaagacgcacccgttcctgggagaaccaggactcgaaggatggccagctttgcccctggcaacttcatagacacttgtgcctggggcccttgtgcacatcctcctctccctctttccttagtggggtcacacaccggtggttccccagcctcgcttcacactccctattttctctcataaagaaatttcccctaactgaacccttgtatgtgtaatcctgttttggcatctgcttcttggaaaatctagactacaatattatcaccaaccttagaaggtggtgaggactaaatgaaaaatcaggtaaaaaaatcatatgaaagacttagcatagttatataaacgattatggaaaagcctcagcctggcacatagttagcactcattattatcatatattctcatgcattatacagtgggtactgtagccatcattgtaccagtgtgagcaggttaatttaacttaggagactgcatttagaagtcaagaaacctgctttcctgccccttccctgctctatctcccgagttctctatcccctcacatgtgccctttatataagagtggcagttgttactcttaactccctaggctggccccggactcctctttttgggataaaggtgattaacgccgtgtggcttttgctgagaagggaggctgctacaggggtctgctgcagggacgttcagactcagtggatttgtagctctttagccccgcagagaggagcccctgccctgctgagctgtaggcttgctgggaggtagcaggagtaggtgggtgggtcactgaggggtgctggcagccgggtagtgttggcggtgggggctgagggaggatgatgggaagacagtgagcctccgagtgaaacagaccatgagaggcgaggtgagtcacaggtttctctcaaaacccccatgcccatggtctctagaatgtgccgaaagtggagcccgccatccccagcctaggccccagttctaagaatgcctccccttctctccctcccacagtcgcccaaattaatcaggtcctcggctttggggggtatcgttctcttttaagaatgcagcagagaaaaccgctgggttgtatcccagcaaaggaggccacagagattagggctgattgggaggaaatgtgagaagagcggtgtctagtttaggttttagaacctggctcttcctgctcacaccaccaaagaaaatttggcttgagagattcaaaagaggttgtgtggtgtgtaggctgcaaccctagattcctacagatctggattcatggtcttgctctagcacccagcagctcagagccctcagtgtttgtatgcgtcaattccccaattagtaaaaacagtgatttaagagcatctttgttatagcgctgttgtgagaatgagatagcgaatcagtattaacctttagcccagttcctaaattaaagccctatgaagagcctctcagctcagttcagagactgccagttcccccttgtgagtctttcttttcttttggatttttgatctccaacgactccataaggaagtgaaataattatccccattttatagatttgtaaactgaggctcagcttgattaagtacctaggaaacaatcctttgtagtacaggaccctgaggttcaacagtggtttatcgcctccttgggacaccacccaaaggcaaaagggaagcagcgaaagcatttgaagctcagagaggctcaaggccaagccacagcttagggacctgcaaagttcgcggagctgcagagctggacgggtggggcagaagccactctttccatcctccaggtccttgcggtggaacattcctcagttaccagcacaactcattttgagttttgttcacatgtcacttttctctttcttttctttctttctttctttctttctttctttctttctttctttctttctttctttctttctttctttctttctctttctttccttccttccttccttccttccttccttccttccttccttccttccttctttctttctttctttctttctttctttctttctttctttctttctttctctttcctccttccttccttccttccttccttccttccttccttccttccttccttccttcctttctttctttccttttctttcttctttttttttttttttttagagggagtctcgctctgtctcccaggctggagtgcagtggtgcgaccttggctcactgcaatctccgcctcctgggttcaagtgactcttatgcctcagcctcccatgtagctgggattacaggcacccgccaccaggcccggctactatttgtattttttagtcgagacggagtttcaccatgttggccaggctgatctcgaactcctgacctcaagttacccacccgctttagcctcccaaagtgctggaattacagatgtgagccactgccccctggccacgtgtcactttttcaatgacacctacccttattgtctgatttagaactgcaatttttcctcccacctttgactcctcactctgggcattctctgtaacccttcatggctctattttaaaaaatcgtttttattgaattactgtgtacatacacacagttatcctacttaattttcccccatagatctgatcaccttctaaaaatctgtataacttgtttataatggctagcatgtaacctccacaagggcagggatttgtgtctgttttatccatggacacatcccagtgcctggcatatagcagctctcagctacttattgaaggttggtgggaaattgctggcatccagtactctttgcagagaatgaagatgaacctccctgacttgacagtttcgtggagaacaacacaaggcgctgtatgagtcagtgctaagggctgtggtaacgacagcagcacgtgctgggtgggaccaggagcatgtccccagaagtctgtgagatccagggaagccctcctagaggaggttagttggcacttccatttctttagctcccccatcagctgagacagctcctcctgccctaatagagggaaggattcactctgtcaaacccagatacctcctgctctttctgcccatttcctcttgttctgccctcagtgggtcctgtggcggtaaccgcactaaccattccagcccatctcattccttaccccacagtcccagcaggctaagtatgggctgctgcagacaaattgcccacaggcttgtgtagcttggaaggggcaagcagcagacagcttgcccttggagtagggttgaacccatggatgcacatcctggcacttgtcatgaagcccaacacatagatgatgctcagtaaatataggatgagtggatggataaagctgagagttaaaagatgcctggaggccaggtgcaatggctcatttctgtaatctcagtgctttaggaagcagagcaggaggattgcttgagaccaggagttcaaggctgcagtaagctatgataaccaccactgcactccagcctgggtggcagtgccctaaaaaaaaaagaagaaaagaaaaataagatgctctgagaagacatttaaatgactcagtctctgtctagacacaacagtggcatcatttaaacaaatttctgttttttttttttttttactttactatgtgtttgtatttagcattttattttatgccactttccccaaatggaagcttgcgtgattgtattctgtgtggcacaaaatcaaggaaataggaaaataacaatgagaatgtagggagaggaggatacataccaaaagccctcactcagtggagccaagtggagctgaaacccggatagtaaaacctgctgttgtctagatgttcagacccctgctcctccaatgagccattctgaggacaaccctgggccacaaccctattgtgggggtaggagtatattccttggtcctcaagcttataggagaagtggagtgtcacaattcttacggggtcccaattcctctctgtatttatattagtatcacatgtccctaaacaggcatattgaagagtaggttgagacatgggcattctggggtatatctgagtcacagaatctcagggctggaggcccacaaaaggatacttttgtttatttctcaaactttctgaaatcatagatcaccaaatcataatatttgccatgctccacccttgcaaactttttacttaaaagatatactgactccaaacctctgaatagccacatatagagcataaactaaggggatggaattgttttaggtattgtggttgcaaaaagataacatttcatcagtcttcactaccagaacatagagaactctattatttttcccaattctaatagcacacttgcaattgttttcataggatctagactagagttccatgaactctataattgaagtcaccaatcccggaatgtacttactcctaagaaggagttctgtagccacattggaaaccacacccctttcttcttgatttgtcctcataggacatgaagagtggttggtgatgcctctttagattcattcagtgataacttacagcctgaggctttcatggggaagccaatgaacactgaacttcagagccttgacttgtggccagatgcagtggctcacacctgtaatcccagcactttgggaggccgaggcaggagaattgcttgaacctgggagacaaagtttgcagtgagccgagatcatgccactgcactccagcctgggcaacacagttagaatccatctcaaaaaaaaagaaagaaatgtgctctgtcataattctggagactagtggtacaacatcaaggtacctgcaggcatgtttcttctgaaggctctggagaagaatcctccttacctcttttagtttttggtggttgctggcaatcctttgttcatgggagtttaattccaatatctgtctctgtcttcatgtggttgtctttcctatgtgtgtatgtctctgtgtccaaattttagtcttataaggcctagtcattggattagggctcactctaatccagtgtgaactcattttaacttgatcacaactgcaaagaccctatttacaaacagggtcacattcacaggtactggagggttaggacttgaacataattttgggagacacagttcaacccacaacacccagtatggtcaacaacatggtgcagctgccactaaaggatcagcaatagtggtgaggctgcatcacaacagatgatcctggagaaggaggatgatcctcctaagctgcctggaccaggccagctccaggggtgtcagcaggacttgactcctctggcttcccttggctccatgacctcacactcccatcttccctttcatctttctggctgttcccccttggtttccattgctgagatctcttcctcaactcaaccattaaatgactgtgttcctcagtggcttaaactttctcttctcattctatatatatatatatatatttttttgagttggtatcctctcccatggctttagttatttatatactgatgactccagaatcttctggagacatctcctgaaatccaattagacatctctacttaggtatcttagagtagctcagctgaatacattccaaattgcgctcttgtttttttttgagatggagcctcactgtgtcactcaggccggagtgcagtggtgtgatctcagctcactgcaacctccgcctcctgagttcaagcgattctcctgcctcagcctcctgagtagctgggattacaggtgcgcaccaccatgcctggctaattttcgtatttttagtagagacagggtttcgtcctgttggccaggctggtctcaaactcctgacctcaagcgattcacctgccttggcctcccgaagtgctgggattataggcatgagccaccatgcctggcctaaactgggctctttattgtagtcctttttaatttaatctaatttaatttttgttttttaaagactagtcaaatgcagtagtgagaagcaggaaaagaggataacaaggagtttgatctgtagctgatagtgaacaatcaatcgagataatgtactacctttggaccagccaattcccaccccctctgccccgacactttttaatttttttaacctaggcttccttcaagatttccagcctcagtaggtggcaccaccatctgtccatttgcctatgaaatccttggtttcttcctttcctccactcctcacatccagccagtcaccaagtctaattgactttacatttgaactagctcacaaatgtgtctacataatgtcctagttattttgactaccactaccttggtttctggccaccctctgattttttttttttttttttttttttggcttggattactgtaacaggttttgaaatggtctcccagattctggttttattctcttcaaatccactttccatacagcagcctgaatgcaaatacaatcatattattttcctgcttcaatctctccagtagactcccaccctctttaggatatgagtcaacctccctaacatggcctgctagacactgcaagctctgaccccaacttacttctcgagcctcatttctctttattccctcttctttctgtcacttcccctgccccttgctttctcccccacatttttcacatgctgttctttcagcccagcacactgttcctcccttgctttacataattaactgacagtcatagttcaggtctcagcttaaatgtcctttcttctagggaggcctttcctgatccacaatttgcttgctcccatcagtgcctggtcaccaagttgcacaactccaaggggtgaaatttgcattgtattatgtgtgaatggtgcccctgaaatggtgcaatgcacgagccagcacactttgttcctcactgtcactgtttaattatcttccctcctggactgcaagctccaagtcagattctccgatgtaagtcttgtataaagtaagaactcaatcaatatttgttgaatcaataaatgagatcttaacagagaaatggctaattggaatgtgcacaagaaatatgaaacaaatttctggaaccctcccctcttacagaataatttaagtaattgaagatatttagtttggacaaatgaagatttagaacagatataatagctgctttcaatatttgtagggctagtgtgtgaaaatagaatacatttattctttttttatcccagaaagataaataaaagagctgaagacaggttatagggaagcaaattggggcctgataataaaattgaaataaacttccaaccctgagagttgtccagaaatgaaacagatggcacccaaagtaatgagttctgcttcactgcaaagattgaagtctgtaggatcgaactccatctgtaggatcattgagggcagcagctggacaagagagcttttgaggctctaactcaaaattttatcgtgattgtatggctgtggggaaagtttactttctacttaaactcaagcatttatgtaatgcctctgtgtgttggtcatcactggaaacatgcagaggtctgcactcatccctgtgctcaaaggtgcacagccaggttggaggcacagtgtcaagttcacaatctgaaggcagaaacttgcagagtatcgagtgtctaaaagttcagtacagagtgtggtctggcgttatgctggaaggcgtcacagaagagaaggggcttgaaaacggtcacagtggatgggcaagagctggagaggagggtccacttcaggaggaagaggctgatggtggagcctgcaagagaagcagacgtggccagtacacagccggcgtgcctcacacctttcatttacagcctcggagtctgcagtgggctttgcagcgctctggtttccctagctgaaaccaatgaggaagatgggatggggctggcctgagaatttgctaaaatgcaggagtcatgtcctgtggtgaaagggaatgaactcctcgtctatcctgaactcctttaaatattcggggtacactgtgtgagtcggagatgacttagctgctcagaagaaggaagggagtaagggaagccttggatcaaaggtgcccaacagtttatagcctcagacttcatgtgtctattttgtacatcttttggctgcaagcaactgaaaacccaattaccaatgacttaaaggaaaaattattatcttacatattgaaaatgctgaggtagttctgatcttggattggttaattcatgggtttaacaaaaacatcaatgtcctacttctttctgttatttcgtttgttgctttccacatgttgatttatcctctttggctgagtcccctcatggttcccagaagactttggcaattccaggcttcaaatgtggacatttagaggcagaaaaaaagcctagtttccttgcttttaagagtaagaaaatatttcctgatactccttcggtcctggagagactcagacctctctccatgttttgttatccaggttatatcacaaacccattcctaaatcagtcactggacaggcgaattaccatggaaggggcgcacttcccctgaagcacatggatgcccgatacctgaacaaaatcaggatttgttatcatgagagagaaggatgtcatgttttctcttgagttaggatgctaagttcttcaggtataatggagacgagggtagagatgacctggccagtactatttgccttacctgagctgggggtcccagtcaggatatgctggctgtgctggggtagctgtggttggttccttggtggagactgagattctcactggagcagtaggttgtgggttcaaccagatgacctttaaggcaacttacaatccttaccacgagcctggtattgtgctgggcccacagcacagtatctcttacaatcttcatctcagatctgcgagtgaagaattattattcctatcttcaggtaagggattaaaattatgtaactttcccaaggtcaatagtaagtgagagtgggaatatgaaatctggttagtccacgtataacataagtgtttgtccagtgtatgtctcactatgtctttcttccaacttaaaatcttccatgagtctggaacaagcctgggagtgtggcttagacctgtacttatcaaactctctttggctaagagccagattttttaaaaattttaatccattatggatcaaaattttttgtaaaatataaaaaaagaaatacttggaaaatgaaatgaaaatataataaagatatacaaaatacaagccctgttttaaattatttaatataacacacacacacacacacacacacacacacacacacacacagataatctgtcaaattgctataagattttccaaactcttaatttctgtacttaccttgccacaagctggcaacaaacagatcatggaccagccctggacttcagcccacactgagtagcactgattcagacagctttctgcctccatcctcttccctggactgcaactaaagatattcaatgatcggatgcctctgccgaggtgacagtgggagaattactggttgtaatgttaaggcaaacatcagaggaagagattagattttgccctgttgttttcataggaacttctgttttctttcttcctttcttttttctttttttctttttttagaagaagaaaattttattattcagtaagcattaactagaacgggatgtttgtcataggcaatttgcacatagattgcaaagtcagaaaacaaaattcacccttctatacagacaagcccatacaatcctttttccatacacgttctcaagataaacatgactagtcctcaacttgactagtcctcaagtaagacgacttgactgcactatttgttacacatcctagattcacctgctagcaggggtgaccgtctatgtttgctaattggatttatccaaaggaaaaataaatttcttcatatttttgtgacaagaggtgagttttggagagaggtgcctgcccacgttaggctcctactctccggaagagacgggaagtaggggcactgtcttccttaatgattgcatttcaaagagatggctcccgggtacttgagaaagacattcctgaagggaagaaagctggcaagaggcttatttaccttttaaaaagatttacataatttcaaacaggtagagaaagaacttaaaattacaagttttctaaagtaaatgctcacagggaaagttaagcctcttttttggaatttttaaattcagaggtacaagtgcaggtctgttacatgggtaaacctgtgtcgtgagggtccactgcacagattatttcatctcccgggtattaagcctagtgcccattagttatttttcctgatcttctccttcctcccaccctccaccctccaggacgtctattttcttcaagagatttatattagacttgagaaaacaatttctccttccttccttctttccttccttccttccttccttccttccttccttccatccttccttccctccctccttcctccctccctccctctctctctctttctgtttttctttctttcttctttctttgtttctttctccttccttccttttctttctttcttctttctttctcctttccttccttccttcctctctctttcttctttctttcttttctttctttctttctttcctcctttctttctttcttcttctttctttgtttttctccttccttccttcctttttctttctttcttctttctttctccctcccttccatccgtcctttcttccttccctctttctttcttttctttcttctttttttttcagcgtcttggctctgtcacccaggctggagtgcagtggcatgatcacaactcactgcaacctcaaactcccgggctcaagcgatcctcccacctcagccgctcaagtagctgggattacaggcatgtaccaccacacctagctaattttttgtattttttttgtagagatggggttttgccacattgctcaggctggtcttgaactcctgaactcaagtgatctacctaccttggcctcccaaagtgctgggtctacaggcgtgagccactgtgcccggcctcctaggaaacaatttcttgatggtgattttccatctttttgctgtgtaggaaagagattgagctccatggtaatatgtgagagagaagagactcaagggactaagaacctgtaccacaaaaggaaggtctgttttggagatttgctggagcttccccattggatgtgtcattgaatgatgattcatcctggccaaaaataaaagcttcttaagctgggtgactctaagtttgtgtgtggtttacgcttggacatgcgttacttttatgacataaaagtgacttcaatctggtaagatatatttataaacatagaggtcctttcatttattaggaaattccaattgtgttacggggtcttctcaagagatctaaatctattctcctctaagatttaggaaatctaagccgggcatggtgtcactcctgtagtccaaacaccttggaaggccgagacgggtggatcactcaaggccaggagtttgaggccagcctggccaacgtggtgaaagcctgtctctactaaaaatagaaaaattagccaggtgtggtggcatgcacctgtaatcccagctacttgggaggctgagacatgggaatcacttgaacctgggaggcagaggttggaatgaaccactacactccagcctgggtgacagagtgagactgtcaaaaaaaaaaaaaaaaaagtttgaagaaatctggaatgatcatttgtccagtatatgaaactctgagaatactacacatgtggaaactagaatctatcagaaattccaggatgctcaaatatcttctccctctccttcattcacaaatgatttgaacacttatatttttccttctactgctttctactgattttccttctactgctgtgagtctgatgggcttcaataccattgtggttgacttatccaaatgtgacttttcaattctgtgacttttatatctccaatgaccttttctttgcctctacacagcaatttgctctaacggttacagcctggattttgttattcctcaaaatgataccacctccaaaaatcccttcatttgagcattccattctcttgccacagcctcctctctttagtgattcagatactcccactacaactcttccttgacctcatgatcaacatgcttccttttcttttttcagctctctcctgcctttatttcctgcattattgaacttagactgcttggttcatcttttcattcaggctcttagctatacagacataccttagagatattgtggatttggttccagaccactgcaagacagtgaatatcacaacaaagccagtcccacaaattttttggtttcccagtgtatgtaaaagttatgtttatactagactgtagtctattaagtgtgcaatagcagtatgcctaaaaaagtacatcaatatacatatcttatttgaaaatactttattgctaaaaatgctaatgatcacatgaaccttcagtgagttgtaatctttttgctggtggagggtctcaccttgatgttgatggctgctgattaaggtggtggttgctgaaggctgaggtggttgtagcaatttcttaaaatagacagcagtgaagtttgctggattgattgactctttcacaacagatttctctgtagcatgtgacgctgtttgatagcattttgcctacagtggaacatctttcaaaagtggagtcagttctctcaggcctgtctgctgctttaccaattatgtttatggagtactctaaatgttttgttgtcatttcaacaatattcacagcatcttccccaggagtagattccctcttagtaaccactttccttgctcattcataagaagcaactcttcatctgttcaagtttgatcatgagattgcagcaactcagtcacatattttcagtctgcatttctagttctcttgctatttccaccacatctgcagtgatttcctccactgaagtcttgaactcctcaaagtcattcatgagggttgaaattaacttcttccaaacttctgctaaagttgatattttgaccttctcccatgaatcacgagtgttcttaatggcatctagaatggtgaatcttttccagaatggtttcaatttacctttcccacacccatcaaaggaatcattatggcagctatagcctcacacaatgcatttcttaaataataagacttaaaagccaaaattactccctgatccaggggctgcagagtagatgttagcaggcaggaaaacaacattcacctttttgtaaatctccatcagagctcttgggtgaccaggagcattgtcaatgagcagtaatattttgaaaaacatcttttttctgagcagtagatctcaacagtgggcttaaaatattaagtaaaccatgctgtaaagagatgtattgtcatcttggctttattgttccattgatagagcataggcagagtagaattagtataattattaagggtcctaggatttttagaatggtaaatgccctcaaggtgggcggatcacaaggtcaagagatcaagaccatcctggccaacatggtgaaaccccatctctactaaaaatacaaaaattagctgggcatggttgcgcatgcctgcagtcccagctactcgagaggctgaggcaggagaatcacttgaacctgggaggcagaggttgcagtgagccaagttttcgccactgcactccagcctggtgacagagcgagactccgtctcaaaaaaaaaataaaaataaaaataaaaaaggaccttggcctcaacttagagtcaccagctgcatcagcccctaacaagacagtaagcctgtccttggaagctttgaagttaggcattgacttctttctagctatgaaagccctagatgacattttcttccaatataagaatgttttatctacattgaaaatccattctttaatgtagccacttttatccatgatcttagctagatcttctgtttaatttgctgcagcttctacgttagcacttgctgtttcaccttgtacttttacgttaagaagatggttctttttccttaaacctcatgaaccaactactcatagcttccaacttctcttctgcagcttcttctaatccagagcaaggaccttgaattgaagagagtgagggccttactctggattatgctttgacttaagggagtgttgtggtggatttgatctatccagatccctcaaactttctctgtatcagcaataaggctgtttcactgacttaccatctgtgtattcagtggagtatcacttttaatttccttcagaaacttttccttcacatttactggctgtttggtacaaaagccctagcttttggcctgtctcagctttcaacatgccttcctcactaagcttaatcatctctaggttttaatttgaagtaagagatgtgtgagtcttccttctccttgaacacttagagaccattgtaggattattatttggcctaatttcaatattgttacatctcaaataatagagaggtcctaggagaaggagagagctggaagagcaggcagttggtggagaagtcagagcacatacaacataaatgaaatgtgaaattactttctaaaccccatggagggaaatgaacaattcccttttcccctaaaataatgctactaaagcaattagacttagtctagacaagacagaagatgtataagtgaaacattagaagatccttaaatgaagagtgaattgtagttgttggtgaaaaacaagattaattttatatttgctaccataaagtttttgtgtatcacttatatcaataatgttatcaaaagcttacaaaaacaaaaatagatttactttttaaaatgttgttttaattttagagaaaattgtctatttaaattgagtgaaactgcatgcgacatatgaacaaaagtgacagttcaatacaacataagaaaatcagagcaaggaaaatatttttctgactttgaaggcaaaaattcatgcacaaataatcctcaaactaatttcaatagaacctattttctgctcattatagaacaagccataatctcaacagtagagagatttgaacaaattggtaactttgaaataatttaagatgtagcatatggttctagatattgctttaagagataaaaattacaatataagtgatagcaatttataggatgaaattaaagcattttatattttgtgcaagaaaatagaatacacatgacattgatcagttaagttctctgtcttatatggacacagtttgtggtgccccaaaacaactacagtattagcatcaaagatcactggtcacaggacatcacaacagactgaataatcatgaaaactttggaatattctgagaattaccaaaatgtgacacagagacacaaagtgagcacatgctgttggaaaaatagtgtcgatagacttgctcgtcatggattgccacgaaccttcaatttatgaaaaaaccctgcattatctacaaagcacaataaagtgaagtgtaataaaatgaggtacacttgtactctcaactcctcctcctcgtctttttgttatactcacggggcaaaacaattctgccttctatgtattgctcccccggctgccaaaagaatcctgagaaaaatgatatagtctggcagaccatttcaattcatgatcacctacctcaactgagctcaacactgcctgggaatctactacatttctctagagtcgtttgtcttccgtgtctctgcaaacatcatttcaaacctttgtttctctccttaaaccgccctgcattctctccttattcattctcttaagagtaaatataagtcatctgatgaaattaacctcaacttcctgccaacgattcttcaaaccaacctgcttctgtacccaccgtctctactttcttcctgttattattcagaggaggtgccctcttcatttcaaaggtagttctttgctctgcctgcatcccaccccgtcctgctttctgagtaacctgacttcatcagttctcccatctcactcttctgtcttcaacttcttcttctcctctcctggcccaatgtcttgaaacagttgtccacgcttgtcatcctattattattatttgagatggagtcttgctctgtcacccaggctggagtgcaatggcatgatcttggctcactgcaacttccacctccctggttcaagcgattctcccacctcagcctcccgagtagctgggattacaggcgtgcaccaccacacccgactaaattttgtatttttagtagagatggggtttcaccatgttggccaggctggctggtcttgaacttctgacttcagatgatctgcctgccttggcctcccaaagtgctgggattgaaggcgtaagccaccacgctggtatagcaggcatgagccaccccattttttcacctcctatttcatgtgcaaccatccgtcttccatccctaccgctctacatccctacagctctacatccttacagctcttcttgataaaatcaacagtgcctttcatgtgttccatgcactaggggctcttttgccttgattttacttgacgttttgatagcatttgatctagctgaccattctctttctcgaaatagtttctttccttgtcctcagggatgccactctcttctggtgtttctttttatcgctcaggccactctttaatgagtctctttgacagcttctcctgctctggcttatgaatatctgggttcttcggagcttggttctgggctctcttctcttccattctgcactgttttcccttggtaatcttacccactcccacgattttactcaccatctttgtatcaatgacccccacatagtgatctccagactcaatcttgatgtccatctgaccacgtgtatattttcacttaaagactcagaggcacctccaactcagcaggaccagtgtagaccagatcaccttccccttcaaacttgctgcttctccacccagctgctcagacaagagatgagggttcaccttggccgtcgcccactctcaccattctgacctaaataattgcagactatttgaaaccttgcacttctctcaattcctgtttattaccaccttagtccagaacacaatttcttcctgtctggactggaagcaaatggctcctaaatggtctcatacagaaggtatatattatcctctctgtttaatagccttcaatggcttccctttgctcttagagtctaaatttttgaccatagcctaccatccctgagtgatcagacccatgcccacttcttcaagctcgtcttaaatctctccccatcacatataatgtcccttactctctgtgattcatcttttagtttctcaaagagtttaagtttcttcttgcctcagggcctcagaacatgagatgggatggagaagtcagagagctgtgaagagagcccagggtccagctgggtcgtgaattggtacaaatttacctttgctccagagataaaccccttctcccccgttctttgctgttcttagtggtctttaaatctgcaaaatgctctgcttcttaccacctctctcttcattgggccagctcctgctcatccttcatgtccagttgaatgttaccatctcatgaaagcatcccctagccctgagtctaggttagttgctttctgaaatctcacacttctaattaatagaaataatcatgattataataacattatatagttaactttataatatctgtttcctcaactagctattaaatccgtgtagctggagccaggattggtgggaggctgaggaaggaggatcacttgcacctaggagttcaaatccagcctgggcaacatagtgagacccccatctctatttaaaaaattaaaagaaatccacgagggcaaggattatgtctgtcttattcactgctttttcttcgacacccagcatagtacctggagcataataagttctgagtgaataagtgtgtatcttgtaaaacctctggcttggcttgcctccaagccagaggtttggagactcctttccaaaaaaaaaaaaaaaaaaaaaagaaaaagaaaaagatgtaatagatgactgccaaatagaactctgattgacatgaggcaacctgtctttccacacaaagtggatgactccatctttgcagattatggagaagcaatctgcttctctttcgatttgggtgtcatgatcatcagacatgaatgtggagattattatgtagggagattcaattagttacttaatgccacatactgaccaaagttactaattcagccttggtgaagagtatataatagggtcagtttgcggaaataacatcccacttccctaagtaatgcaggaagacttctttaaataagcataagattccgggttgtatactggacacacaatgagctctgttatgcaatggcttcatgaccttggaaaatatttttttcttgaataatagtaagggagaatagaatagttggctgaattctcatatttcatattgctagcagatcagcagcaatgatggagaaagcatatttgagcaaagtccagtgctgtaatcgaataagctttctacatggttgatctaatctatacttaatagtatgtgtagctattattgctctaaatggcagttaggcatgtatattaagctgttcactggatttatagaactctaggggctataattcataatgtgtatttttttacttcaccaagccaagcatttctgaggtcaccttcaggaaattgaaagtgggcactcaaaaatggttgcttcctttctttcccttccaagtgcagggacaaaccatttactctttccgcccagaaatggtggtagggaggcagaaggcactgtaaggaaaagcccaggtctatgattggtacaagcgcaaggcatgtccagctattttccatggtgttggcacctattgttccatctggttggatgggagcattttcccaaatgtctgcgatagagctgcttttattaagtatttactctgtgccgggagacttttatgtattcaagcctttattttttctgacgacaccttgaaagagtaattattctctccatgttacagaggagaataccaagctagggaatgtctcaaggtcatgtagctgagaagtaagtggaagcctgggctcagactccagaggctgtgcatgtcaccctgtgctgtagagtcagaggtacgctgtgtcactttccttaggtcttttatgtcccccttgtcctctccagccagggtgccaaggaggcctctggaagctaaaggctcaatggcagctcaattctgctgggggagggagctgttgataatacacagataaatgggaactgcctggcaaattaggagtgcagatgctgtagacacaggaatgagtcctggaggaggattccagtgggaataggcctggtggactggaggagtcagtggctggaatgaggaactacaggctcgaacagaatttagaggtcatctagtttagcgacttttaagcttttaattgaaggactgctgctattaaatttctccagagactctctgttttaaaatgttttggctgcttaaaaactttttaaagaaataattccattttctgattgccttaatcaaagatgtaatagatgggctgggcatggtagctcatacctgtaatcctagcattttgggaggctgaggcaggtggatctctggaggccaggagttcaagaccagcctggccaacatggtgaaaccccgtctctactaaaaatacaaaaattagctgggcgtggtggcgggcacctgtaatctcagctacatgggaggctgaggcgtaagaatcgcttgaacctgggaggcagaggttacagtgagctgagatcgtgccactgcacactccagcctgagcgacagagcgagactccttggcaaaaaaaaaaaaaaaaaagaaaagaaaaagatgtaatagataacggccaaatagaactctgattggcatgggacaaactgtcttcccacacaaagtggatgactccatccaaacagggagaagtgctttttaatgagcttgtgcagacttatgagaggaggtgttgctaaatgcacaatttccatgaggctttttcaaattttggaaattgctcagactacccccatcacctgctataagcgctgtcactcttgtccccaggagcgactggctccactgtagtggccacagaggtgaatggttttccccaagggaaaccattgattcagacctattttcttatttattgttgaggaaactgagtcccagacaagttaagtaaaatctttgaagtcaccaagtgagttagtgcctagaaggggtattgaataatggaacccatgtgtcacctgggacccactagcccctgaagatatgcaattgactggttcattctgtagccagttctgtcgcttatgaaagttgaaagatcttcccattatttaaaattctgggtttatgttcttacaattcagctcccatttccttggagtgttaggtctggttttccctaaatcaccccaggactaaagctggttcccgtattccacagttaaaactactcatataagtgttttgagggggacacatgtcacagaatgggaagttttgtcactgaactaacttgcctttctcctttcctttcctttcctttcctttcctttcctttcctttctctctctctctctttcttccttccttcctttctttctttctttttctttttctttctttctttcttctttctttttctttttctctttcttccttcctttcttctctctttctttctttcttccttccttctttctttctttttttctttcgttctttcgttctttttcttttttcttttctttctttctttcttttttttttttaagtttcgcttttgttgcccaggctggagtgcaatggcacgatcttggctcactgcaacccctgcctcccaggttctagcgattctcctgtttcagcctcataagtagctgggactacaggctcgcgcctgactattttttttgtatttttagtagagatagggtttcatcacgttggccagactggtcttgaactcctgaactcaggtgatccacccgcctcggcctctcaaagtgctgggattacaggtgggagccacggcacctgctctcttctttcttttcatctctgatctcttccccttccttctgccttgtgcttcactcccagggtggaagaacccatttgcttcttctctaatttctgtcagtggctgcataggtaaccacattgtcatcacagattgcaggggcttctcaccagttccaccttccttacctccaaagccagcatcacagacaaacagattttcattctccactgttttccaaactcaagtgtaagggcacagagtagacatggaagagaggaaatggatgcttttcttagagaataaaggcttgttgaaaaaaaaatcccatcaaaacctcatctctgtgctccctgttcaaaacacatatgtaccttcatacctgagatttcatttggcagttatagcaaacctggtatattagtcagctcaggctgccatagcaaaataccacagactgggtggcttaaacaacaaaaacgtgttttctcaatgttctggaggctaggaagtccaaaatcaaggtgctggcaaggcaggtttcattctgagtcctcttctcttggcttggaggtggccgtcatctcactgtgtgctcacatgacctcttctttgagcacacttgggggtagtggggggaagacagcaagctctctagtgtcttcctcataagggcactaatctcatcctgagggtcccacccttatgacctcatctaaccctactcacctcaaaaagttccccacttcaagtaccatcacactgggggaaagggctttaaaatatgaattttggtgagacacaaacattcaggccatagcacctggggagacgttttgctagtattccagatgagaaactaagccttagagaaataaatctattagagtgagcctatgagagaggactggtgggagtgtgcatgatgatggcctatccaggcacactgaggcccacccaactcctcccctttgccctgccagctcaagagcgcaaaactatttcttctagattcttaaaaggttgtgattgttttaaaataggtgcacaaattcttggacactcctcccttcaaaaggcagaatctaattccttttcccttgaatgtgggctagacttactggttcacttctaacaaacggaatatagcagaagtgatggtgtgagatttctggaattaggtcgtaaaatatactgcaactttctccttattctctcttgcatcattggctctggggaggacagctgccatgttgcgaggacactcaagaagccctgtgaagaagaaccaaggccacctgccaacagccctgtgagtgtgccatgttactcatgaatccgttagcccagtcaggccaccaggtgactgcagccctggctgtacttctgacaaagcctcattagaaatcctgagatggaattcctagttgtcactcccagactcctgacttacagaagctgtgagataacaaatgactgttgttttaagcagctaaattttgaagacagcaatagataattaatacaaagagaaaagtattttattctatactcagttctccattctccatgttacccatgtggccaagccagattgacatttctcatgctcccagacagccagtgggtcaaagaagaaattaaaagagaaatttaaaaacatcttgagacaaacaaaagtggatacacaacatactataaaacctgtatcttaatttttcatgatacaaacagaattatattaggaaagaagaatgatgcagtaatttacctgtgaaaatgactttaggagtgtaggataatcattaagaccacggactgtcttttaatagctggatgaccaaaggtaaattatatagcttctctgggtctcattttcactacatgaaaaaatggagatattaatagtgcctaatagttttacctgataattaatgagctaatatatatcaagtacttagcaaagtagccagcaaatgactttagtcaatgttcatattgccattaacataaatatcaggtatactggaacaattatacacacaaacagatgataaattggaagtgcagagcctatgttttctcccaggttaacctgtgatcaactcatgatttaaaaagctgggttaatatggttgtttagaaaccctgactgtcaaatatgatctacagaatgttagattattaaatcccaataaagcaaatgtaacagaaaaaaatgactatcagcttcctcttggagaaaacagcaataatgccatcttattgctacataatacataccaaatggcttaaaataagtgactagcttaataaactgtagttgcttaataaattgtagctatcattaacatcttttcagctgtacagctttttttcaggtgagtttctgtttgtttcagatgcccacttcgctcagatgaaatgccaggctcaaactaaagtcagtatgcattgcctggaaggctaatggcctaagccttccaggccaggggacttgtgaaccctgaaaatttaagacaggtctcagttaatttagaaagtttattttgccaaggttgaggacatgtgcccgtgacacagctttgtcacacagcctcaggaagttctgatgacatgtgcccaaggtggttggggcacagtttggttttatacattttagggagacatgagacatcaatcaatatatgtaagaagtacattggttccatccagaaagatggggacaactcaaagcagggaaggggcttccaggtcacaggtaggtaagagacaaatggttgcattcttttgagtttctgattcttttccaaaggaggctatcagatatgcatctatctcagtgaacagagggatgactttgaatagaatgggaggcaggtttgccctgagtagttcccagcttgacttttccctttagcttggtgattttgaggccccaagattttcctttcacagactcaggatgtcttcttcagttcaggatggacagcctcagagtagagagcttcaggccccctctccttatcttctgctaacctccattcttactcctaccctttcatctcagaattttcgctttgatgtttcccacttccttcctatggttactttaaccgaagtgagtcaggtcttactgaaaaactgaccacagcctgtccgctcccagccttccccagaccagggctgcccaggcagagcgtgagggggactagtgtttactcagctcatttttttcctcctctctcctctaagtcacggggctttgagtagggcttccccagccaccgtgcccctcccagcagaccgcagtcagaagccaatctcacatttgtctggtggctcagagaggggacagaaagagcagcagcttatgtccttggctatcctctcaagtgggctaatttgcttattttcaactctgttgggtccagccctgttgcctctgatctcagctcaaagaggatttggcgggagtttttggttgtgataaccaataacaaccaactatacgcactgcgaacatctcctagtgccagaagccctgttagctcattatcttaatcctcaggataacccaggcaatttgtattcaccctaaaaacttcccctggccgggtgtggtggctcacgcctgtaatcccagcaatttgggagactgaggcaggcggatcacttgaggccaggagttcctaaccagcctggccaacatggtgaaaccccatctgtactaaaaatgcaaaaaattagccgggcgtggtggcacatgcctgtagtcccagctacttgggaggctgaggcaggagaatcacttgaacctgggaggcggaggttgcagtgagctgagatcatgccattgcactccagcctggagacagggcgagactccgtctcgaaaagcaacaacaaaaacaaaaacaacctccaaaaaaccttcccctgtttacctttctaattttggtacctacagaatctccccgttagccttgaaaatcagcatgatctttaaggatttaggagcaaatctttaaaggattgagttgtgggaagaccatgatgtctttgctactggcttttgcagtgagaatagctttttctctgatcaggtttggagccttccctctctcctgggggtagggggtagctggcttcctttctctgaaatgcagaattcattcacccactctcttttgtcttgggagctttgagagaacaattttagtcagacaagagtcaactgacaccagaacatgatgtgaataagatacatttatttattcaaaattaaaatctgctatgaagacagacaaacaatgtaacattcccagaggaattgaataaattctagttaaaactgagttctattagaaccaaatttatttttatttttattttttgagacagagtcttgctctgtcacccaggctggagtacaggggcatgatatcagctcactgcaacttccatctcctgggttcaagcaattctcttgcctcagcctcccaagtagctgggattacaggtgcgcgccaccatgcccggctaatttttgtatttttagtagagacggggtttcaccatgttgaccaggctggttaggaactcctgacctcaagtgatccacccgcctcagcctcccaaagtgctgggattacaggcgtgagccaccgcgcccggcctagaaccaaatttaggttgttataaataacaagctggccacagctttcaagaatgaagtggttggggaatgaggttaggggaatccctccgagacactggaaggtgaattaatcatcaaaggggctccctggtttctcttcctaagagtatttgtagcagttaggaagccccaagcccagagacaagataaattagagggaggtcagggaaaacagctcaacagctagaaagcgtggtcaggcttggaatggaagcttctgttggctccccaaagaacattttttttcctcccttatgtaacttataatttatcttaaaacactcaaataccatagtgtgtcaccctatggaaacagcttaaaaacaggtgaaaataataaatattgaaaaaaattataatattgggcttctttctaaatcgttcacagagaagctcagtaaataaatagaaatgggggttgaggtatcagaggtaataaatattctataagagaggtacaataaggtttctcaaggggctgggtcagctatcccagagccccagatccgattttggagacctctaatttatgtcctagagtctatagagtcgccaccctgatgtctcagtttcgtatcttcattgtcatgtaggcttctatgtagttgatgaagatgtcaaactcactcatggctttgtagatgcctttctcttggagctgtgcagagagataagaaacatacagttaaaatcctttctggggactaaataggctcccctccctcatgctcatggatgggcatgaccttgagtgcagaggttgcttgttctccctcacgctgggaagtaaaccagaggataggcctagctgccttgggaaaggctgtgcattgaccttcatctcctccaggcctccccctagcaaggggagcattcattttgcaaagcactgtcttcaaaatgatgccttttcaacaattttaaaggtcacgtattcacatgatgattatgcagagtttgatgaaaagacattagaggaagcgcttcgaaagcaagacggtgagaggagaggagggagccttttaaatgtctgtgttctcccaccaacacactgagcaggccctgccctgccgccctgacctactatgagaaattcacaccccctgatgttggcactctgtgcagtgtctgtccccagcccacgaggaggacataggccgcacggtttctgggaaatcagactgaaaaagttcacgcacagttggaagtgtgaaaccccatttcgtttgggaactgacattctcaggcacctccgcaggtgcgaagggcagatggaaagcgggcttgaaccaactccaggttaagtgagaatccagcttcctgctcattctgagttctggggagtctgggctgaacccccaggtgtatttgtatgtgcacatttatgtgccagcttcctgcacgtgtgggttcagcctagattcccaacaagctactttctgtactttctgtttcctttgtcactctccccagcatgcagctcactgtgttcacaggctggccggccagcctaacccgcaagcctgcaaaggcagcgagcagtcatttagaaacccccaaagacacttaacagaaaacaaatacaatcaaggcagcagctcctcactggctgagcaggtcataccatctgtcaggttcccacactctctccaatgaagaatggggcctattgagtccccaccaccttccatgctttggggttggggagtgggcatgggttgtgctctgcagaccctctctgccaccatccaagctcaccttattaaaggcattcttcacctgctccacggccttgctcttgttttcacagggaagaaatcgatgctgtggaagaaaagagaaagtgttggtgatcctggcttccagctccatgtccatcacacttaggggacaagctggtggcatcatgaggaggccagatttatccaaatgccttgcctcacagctcccagagagaactgagccctgcttccatggccctgggagttaaatgtatttctccaggactcactccaagatgtttgcaaggcttggatgacaacccaggtcttgggattccttcctcccccagaactctacagtatctcctgcagtgctgagcgaggcattcttcagcctgtccttttctgcctctctctcctgttcctccccgtcagtcacagccaccgaggaacacttctaagcatctgaggagggaagctactgggaccaaacccttcacatagccttgtcctacaaatagacaccaactgattttccaatattggtgacagaacaggggaaaccattagtagtgagggcatcatttcagttggagaaataaattacctggaggaattactcatagacactagcctggggatgaatagcccccttgtcccttctaaaatgccaggggaaatcctgtcagtcaattgggcccttcttagagctttgctttcaaaacattgagattaaaagaggtgaatgatgtttcctctgcttgggaaccttagctccccgcccagggtctagttacaaagaggcagtggaggcctgactgaagctctgggctccttttatgaagagagaggggagtagttaataacccacaaatgactcacaaataacaggaaagctgtttgcaaatttcacatgtaaatgcctagcagccacccccaacgcctgctcaaagagaaatgagcaagagatctgactccaggagtctttcctcatttacagctagctctgccagtctgtgtctttgctgtgtctgtggatgtgagtgtccctgctggtctgtaggagatggtattttgggggcagctgcaagggaaaaaactgatctgctacttacacagcgccgtagcctcagcctgagggtcttcaggttctcccccagggagttcacatgcgccttgatgtctgggtcttggttctcagcttggggcatcacctcctccaggtaaaactggatcatctcagacaaggcttggcaacccaggtaaccctaagggcaggagccaaaggtgagtgagagattggcggaggtggctgggaggaggggctgctgcaactagcttaagaggacagcttggttctagcgatcctccttcaccagaagcctccccgaagggactgagccctttgtaaaccctctggctgctggatgtgctgagttaacatcttcccacttctccttttcaaagcgaaggaaacaaacccaattccctgcaatcaggaagcagagtctcccttcccttaatcatgctgcacactcccccagcaccccgcccctgctctcaccttaaagtcctccagcaaggactcctttaacaacaagttgtccagctgatccttcatttgctgcaggaagaacaaaaggagaatgaacttgaggtttggggaaataactgaaatgcggtctttttgatgccctttcatttagagatttttttttttaaataaaattggctctggcccaaaaaaatcaaaaggggagttttaaaaacagaggattcaacagtgatgggaccatcacttaaatcaggtcctcctcctcagagtcaagttatttaaaaaatctggccgattttgaagggaaagcagaagcttgactcagtcctggtcttctttctgcggagctacattcggctttaagggacacctatgtcaacccttcggggccttgagcccccctcatgtcctgttctctgcttttctttctccccactgtagacatccagtttagcttggaaagatcccagggattaagaagctccttctaatgcaggtttccctcatgtagagtgcttccctaaaccactggtctttcaggtctggaaacgctctaagcagaggcaatttaaatttccctgctgcaaggcatggggagcatcttcacctcgaatcagacatttctttacttctcctagccaataaagtatagagcgccagcaggatcttataagtttctcagcacgagagagaacgcatttactttataaggcaggtttcctgcacatttactgtatcatctggcttagcttaactcaccaaacccatggcttgatctaggattctcttaagaatttaagtttgggggaataggtgttggggatggaggtggaggcgcaggaggagggttcttatagttccaggagaatgtctagttcaggcagtcccaggaagagagaaaggacaggaaggaatcatactcacaaagaaagtcttcactctgctgaaggcatctcggagatctcgaagcatgttaggcaggttgcctgggaagtgggtgcagctgttctcagactgggtgccctggcctgggctggccctcaccccagtcaggaggaccaggcaacagagcagtgctgagctgtgcatgccttcttttgcaagtctgtcttgtggtttggttttgcaagagcaagcccctgatgtgtagaccttcacctctctgtcccccttttatattgtaagctcagggaggcctcttcattcattaaaaagccacaatcaaggtttcccggcacaggattttttctgcttagagctcctccttctctaacctctctaataaacttagttttcaatttttgcatcgtaagcaaaaatgattggttgaacatgaacttctgcattacagctatttttaggatgggctacctctcttagaataattttttagcttctcaattaaaaaaagttgatttcctggggagaacagctgttctgtgcgcagaggccctcagctgtgggttctcattcgcgtgttcctaggtcacagtgacgtggacaaattgcccattccagaatacaatgggattgagaaataattgggtccccccaacctgggatgaatacccaagacttctccttgctaacttaggcagtcaccttaggtctctgggccttagtttccccaagtaaaaatgagggggtgggctaaatatcctcaaagttcccaagcagcccttccattttactttccagagactggcttcctacagtacaggcggggtcacaggatgtgttccaggctcctttaccccgatttcattaggattctcaggcacatgtttccacctcttcagctgtcccccaccccaactgtgcttgggggaagtgggtaagagtagtctgcacttgctgaaagcttcttatatgctagtcaggtagtgctcaccatgacccctaccgtctctattttatagtgagcaaactgaggcacagagatattacatcacctgtacaagggtacaccagtgccaactgagaatttggtttcctcaccctactgtacaccatctccagcacatagaatgaaaccttggattaaattggccttagagtttcttttagttgtaagcttctgtggctggagtctaaagtttaaaagatggggtggaagaagttgaaataacaaggaaaagaagtcaggattccatggaggctggataggaggtcccttactttcctcttacctatccctacttccccttcccaaagaagccttagtagtgttgtcttggatttgtgtgtgtgtgtgtgtgtgtgtgtgtgtgtgtgtgtgtgtgtgtagaaggtaaggggagccagttgggttgcggcgaggagtgttgctctacctggggaaggaccggggcagtgacatcaggacttcttcagatatctggaaagtctctggggatcctttgattgagccttcaccttccccttccacaggggctttgcctgccattccagtttagactgtaactgggaggaacactgacctaggtgcaggaggcctgggctctgccttggccctgccactctatagtcagggcaaatcactcatcctccctgtgtctgtttttcatctgtcccaacagggcaatagcacctgtcctcctgcctgccagggagcattgagcttaagtagccatggacccagatggagggcatttccagtgttctgctagttcttcacctttctgcatcagcaatgggacaactccagtggcagcaggttctgagcttgctgcactagagaaggtcactcactgcaaggggtgcaaacaccttggggcccagccagcgtgaagtgagtgggagggagggatgagagggcccacgcccaccctgtggatgtccctgctgtgtgacctatggatcagggtcaggggactgtggtgtctcttcccaactcttcagggagtgtcaatgtagaaacctaagaatcaggaagtgagaaagagcctgctagaaactagtatggagctaactcagaacttactggtcctgccagacttagactggcttaagggttctgtctgagttctgctgccaggaagcagagagaaggggaccaggacctgggtttccccttcttgcacctttctccttccccctcggctcctgggttttctgggctgtgtctgtgttagcctgcaggtctaaccccctctctgagctgggtgttccagaagtggactcagcatgggcaccaggcaggccaggggttctggactctgggtgaggctgtgaacccctccttcctttgtttcccatcttgccttgtgcttacctcactaggaaacctgcaaccctacgtggttatcattcatgtacacaccatgccctgccgaatcagctttgagctccctgaaacaggacattgttttattaatctttgcgtacttggtacttagcaccaagtctggcccttggaaggtatcagctatacttgggatgggcatagaagagtgccctgtaagcctggagggtgcgaggctaaggaggtggtctgggcacaggtaagcattcagaaggagagggagagtgactcagggatgcaggcagcctcccttcaatttccttatatgagatgtgtgtgtaaatacacacacacacacatacaaaatgtcagggagaagggaggtatgtaaaagccatttgtacctttctttcatctataatctgttaaatagggttgaggttaggatctgacttcttttttttttttgagacagagtctcgctctgttgcccaggctggagtgcagtggcatgatctcagctcactgcaagctctgcctcccgagttcaagccattctcctgcctcagcgtcccgagtagctgggactacaggcgcctggcaccacgcccggctaagtttttttatttttttttgtatttttattagagacggggtttcactgtgttaaccaggatggtctcgatctcctgaccttatgatccgcccgccttggcctcccagagtgctgagattacaggcatgagccactgtgcccggcccggatctgacttctttatttgttctgaaatgtgtagctaattatctcaagccatttgctgaagatttgattctttccccattgatttgaaattactgtccactctcatttcaaaatttcagaatttaagtggttggagagaaccatgggcaagttccctggtgcaagtcctcatttagcatatggagataacggcttctccatcaatatgtctcatagtatttctgtcaagagatagatatgaacatttgaataaagaccctgtgtccttatattgacaaagcaacaagaacaacaaacaggactcctatttctcaagtttttgaagatacctgttcatctgaaaagtcactggggtccacggggaaaagtcccaagcccataggtcatgtctgagacatgaatgccaacactcacatgtgaggagatttgggtttggattttggtacaaggcaagagcccatgaagagagggaagtgagaaggcaggcacctatggatggatagaatgtcagcctgggcacaatttagtcctgtgaatttcaagaggacacaaatgccactctcacactgtgagcttcttgaggccaaaaggcctgagtccagtttgccctcaagcccagatgcatagtaggcatctaatcaatgcttattatactgattttaaatgaatttttccagtgggggatgtactgggaaatcagaaggttgtgggaaggggaatacctctcttcttccatccctgctccaaaatattctctcatttctgtatttagctgcaaatgaaggaaaacctgagtaagcatggcttttaaaagagggggttgtattttattttctgtctcactcatcaagaagcccaaagcaggcactcagatgtcatccaggacccgttttttctgcattcttgttctcctaacctttgttgcaaggagataggagagataggaggtggtaaagtccaaaggtttaaaggcacaccaacccaggagaccctaataatctttttaggaagctccgcccagtaagtttcatcactttagctgcagaggaatctgggcaggcaagaactgctggggtgtgtgtgtgtgtgtgtgtgtgtgtgcttatgcaaatagattttggagggtgcattctacagtttacaagatcttataaagaatctgcctcccattagagcagtcatcggccaacctccccaacagcacttgggttttcctgttgagagcggggactgagagacaggactagctggatttcctagaccaactaagaatccctaagcctagctgggaaggtgaccgcatatacctttaaacacggggcttgcaacttagctcacacccgaccaatcaggtggtaaagagagctcactaaaatgctaattaggcaaaaacgggaggtaaagaaatagccaatcatctatcgcctgagagcacagcgggagggacaatgatcgggacataaacccgggcatccaagccggcaatggctaccctctttgggtcccttccctttgtatgggagctctgttttcactgtattaaatcttgcaactacaaaaaaaaaaaaaaaaaaaaaaaaaagaatctgcctcccttgtcgggcacggtggctcacgcctgtaatcccaacactttgggaggccgaggtggacggatcacgaggtcaggagattgagaccaccctggctaacacggtgaaaccctgtctctactaaaaatagaaaaaattagctgggcgtggtggcaggtgcctgtagtcccagctactcgggaggctgaggcaggagaatggcgtgaacctgggaggcggagcttgcagtgagccgagatcgcgtcactgcactccagcctgggcgacagagcgagactccgtctcaaaaaaaaaaaaaaaaaaaaaaaaaatttagctaggtgtggtggttggcgcctgtagtcccagctacttgggaggctgaggcagaagaatggcgtgaacctgggaggcggaggttgcagtgagccgagatcgcgtcactgcactccagcctgggcgacagagcgagactccgtctcaaaaaaaaaaaaaaaaaaagaatctgcctcccagctactctcatgctaagcaaaatggcagccttcttggtgtagttaccccatgccttactgcaattctgcagctcaaacccaagagtggggagcaggctagcagccttgtgagggtggctctggagctgcagagggaaggttcagggatccgggcttgctggactctgggtttagacagcttgttgggcaacacggtcagccggcagagagcaggcaggttgacgatgcaggcagagaaggtgagaccgtgcccatcttggggatgggtgacaactgtcctgatgaagaagcccctccgggcttgactcctatttgccattagtagttattttttaaagctgataacgggagtttcatttcttcttatccaggacatttagtgtgtaaaatagctttgccagcttgaaatttctagtattccctcgaataagcttcctcagctcctaggacagaggcttcctcagaagctgtgctgcaacagaccccaatgcctatcacacacccaaagtgtggccagtttggggtgcaaggagacaggagtctgtgagcactgtattcctctgggctttcctgacattggctttgatagtgtctggggtacttcagaataaacgcctggtgggccagaagtttaagaggagcccgggctggggctggcccttaggtggaatggaacaagggttatgcaaaccggattaagcgcccttccgaggatcatggccggcagacactgcaaaccacagatgagcggaagggctgatctttgggcagccaatgtggaattcccctttgtgcaactatggcaccaaatcaggcaatttggattttccttaggggatggacactgtgctctgtaacttctcatatgagaaatttggcttatcagggaccaggacaccaggtgtttgagccttggccacccagaggaccatagttgtttctgctctgtctgcatgactacctaggataactagtgggctcctgagtgtggggcacaaatggattcttttagctccaggactgtccctctggtgcgctttagtttgctccagtctccactggatggctggcacctccaacccaacatatccaagcagggctgggtttgtagataagtgacttctgcagtcacacagggtcccatgactaaaaaagtcctccccttactctgctaccaccatcttgaaattctcaataactgttgagcagggggttccacatttttattttgtactgtcttcccctgccaatttatgtagttgattctgtatctgagagtaaaatcatctctctctggtttcaccttcatccagtgcaccctcgctcagtaaatggaactatcaattaactctagaaatgatttgttggtccctccctcttccttgccaatctatgttcaatctatcaccagaacctccacatttttcttcataaacatttctctaatctactgatttgtctccatttccatcatcaccagcaatgactgtctggttcaagctactatctgttggtagaagagctgaggcaggactggcttgtctgtcataatataaaagagtcttgggagatgtccggggtccagggtctaaaaccgctcgtggcctttggaacaccaagctctgtgccaaagggtagaaggctgccctgctgcaccacaaatctaagcccagggcataaaatccctcgtggcttggatggaatgtgcacagacttgttggttgctctcccaggctcgtaaacatgctctccattatcttgagcagcagagcatattctatatgtgtcaaagaaaatgctaaaccatcacagctatgcttgatgcaccactacctttctacccccacatcctcacgccctcacctgtttacccccacgtcctcaccacctgcttctttgtttgatcaccaataaatagtgtgggctcccagagctcagggcctttgcagcctccataccagtgttggcccactggacccattttatgcacccttaacttgtcttttctcattcctttgactctgctggactttgtagcccccatggcctagtgttgggtctaatcaccccaacactgtctcatctctcctggactccaaaataaatgccaaattgttattctaatatccattctctagaccgttctccacgttgtagcaagagtaattatttccaagcaccaatctgatcatgactctgttgctacttgaacccttccatggcttcccactttccctctcttggtcaaataaggactcatattctaatgttttctataacttcctttatcatctgacactgcctatctcttctgcttcaacttgcggcactcttcactttctacttccctctgcactccagcctcattgactttcttcttcttttttttcaaatgatccgcatgctctctctctctctttttttttttttaaagagacagggtcttgctatgttgcccaggctgtttttgaactcctaggctcaagtaatcctcttgcctcagcctccaagtggctgggcttacattgcaccagccactatgcccagtgatttatcccctctctctcctatcacagggcctttgcacatttagttctcccttcctgctctcctcctgtcttcatccttcagctctcagctcagatgttccttccttaaatgagttcatcattccccagtctaggtcaggccccctgggtgtatcttctcagaacaccttgctcccacccctctgtagtatttatgtcagtttgtaattagacatgtggctatgtgatcatttgattgacctctgtctctcctgtgagactgtgaccacttcgagggcagggcctgtatctgtttttgatgagtgttgtttgctcagtactcagcatggttctgggcacatccaaggttctcactaaatatttgttggctgactgggcggctgagcatgtgcttcctaaactttttgtagtgctacatggctatatgtctgttcttccatctcttataaagtagaagtagagaatggattcatctgaagaaaccactgtccttacaaactatatgcctatacctattatagcttttccagtttttaaaagaattgatctgattactaattagtgctcttccaggcggatgttaactcctccatggctgctggaatgttaaaattctatatggacgtcagaagaagagggggtcttatcaaattcacgtgtcttcttttataaatgggcaaacagaggcctagagaagaagactttcccaggtcctagaggtagttaatggcaaaggtagaatctgaatgcaattctttttcagatcagtacctaattcctttactcatgtaagtatcaaatcactctgggttctctgggcctgcagcaacaattaggggcagctgtctaagatgtgttcggtgtgtgaggttgtggtggtaagaagttgaaagtctgtgacaataagtttccatccattaaacagttatgaatctattttgtactccttgggtaccttaagtttaggaattgggaatgatagtgagggtggcttagatatttttgtcttaggggaagatttctgccttggagtgttttcagacagaatggtgtttctattttgtctctgatccatgagtgtcacagtgttataaagcatagtttggcctgccttcccactgcagtacccctacaggagcaacaccttccagaaaccttataaaagagaggagaggggccaggcgcggtggctcacgcctgtaatcccagcactttgggaggccgagatgggcggatcactaggtcagtagttcaagaccagcctggccaacatggtgaaaccctgtctctactaaaaatacaaaaattagctgggcgtggtgaggctgaggcaggagaatcacttgaatctgggaggctgaggctgcagtgagcagagatcgcgccactgtgctccagcctgggcgacagagcaagactctgtctcaaaaaaaaaaaaaaaaaaaaaaaagaaaaaaaaagaaaaaaaagagagagaggaggaagttgagcactttgctcagaaggacatcatcctgcccattctggtccttacctctaaaacgtgccactgactctcaatcctccccatactccgtgtgttttgtgcattttggatgcacagctgcatcacacatgaagatgcagttgcttcctcccaccctggattcatgctacttccactatgactgtcatttacatgtgcccctcttagctcatagactaagggagaagggaaagggagtgggtgcgagcaactgcgtccagccttgcccccggttccctaagtcagctgttggcgaactatgtggatccaggactcttttacatcttcaaagttatagaggacccccaaagagctttcacttatgtgggttatatatacatatatatgtatatagttatatatacatatatatgtatatagttatatatacatatatatgtatatagttatatatacatatatatgtatatagttatatatacatatatatgtatatgttatatatacatatatatgtatatgttatatatacatatatatgtatatagttatatatacatatatatgtatatagttatatatacatatatgtgtaaacatttatcatattagaaagtaaaactgataaatttttaaaaatacctcctatgacatctttttaaagtcataaacaataataaacccttacatgttaacatggcatttttaaatgagatgtaactattttccaaaccaaaacacatttagtgagaagagtggcagtgttctgcatttttttccaagcatttttaactctctggcttgatagaagcaggatcctcacaactgctcttacatgcggtctgttgtaatatgccgttttagttggagcataagaattttcccctggaaaagggaagacctctcagggtttctcagaccacccttagagaatgaatgctgtaagtgtttcacagaaatctctgggtgaggacaagtaggaggagaatgatcaaagtgtggcctcagaggcaggtgcagaggatgtacccaaagggcacctggcttgggtagacaagggagaagcctactgctgtattctttattcagagtttccaaatagccagggtggtctttcagtttagcagctcctgtgagcctctcacatgtcacggaagctacagtgcctcacaagcggtgtttgtggtttcaagtcaaaacccatgggagttctggggttgatttgccagtgacctgtcattactgtaaaccccttctccaaggggccccaggcctaggactaggttctagaggctgggtgtggtcaaggggcacagagctgttggacaggctctactgcaggcttattttgggctctgctttcttcttctgccttttattctcctctctccctcctctttaattctaaggggcattaaaaaccctgcttagtctttggtaactcttgtgctttctcagtttttagaacaacattgaaaataaaaacagacatttcctagccccactggccagaatttgtccaattaaatcaatatcattggcttgccattctcgtctcatcccatgcagatttgcctggcacacacagtaggtgagctctaagtgctctggtgaacttagaaatcattttataaggagggcacccttttaggaactgggtcagacattgtgtggtcatattaaagctcaatccctggttgcccacctgattgtgggagaccatctatagaaggaggggaaaaagaaactccttttcccagggtgctggactaagaactccagaggccctaagttgtctcgaccttcagatgtagttcaaaatagtttaaggaggcccaacaaggttctgatactcttttgatgattttaaaagtattctttttaagattaaaatacttaaaatacaaggaatactttctaaacagtattattctttcaagtaattaaggagaatctgtttgtaccttggcttttgggtgatctgagactgttcccagcaagaaccttgaattcaggtgcctcaagcagtgggttggatataaattggtatcaggtagtcaactggtttcacgaaagcggctaagggttgtgcacttgagcctctcttatgtggcagaccttatatacctctgacagcaaaggctggaagtgccttccccactttgctcaacccccagccctaccctgggtccaagtgttctgttattggaaaccccaagatgtgctctgtctttgggcttgtctttgcagcagagcatggtggttaagtgtgcgggccctggagtcggactgggtttgcaacccagctctgccctttcccatctgtgtgaccttgggcaagtttctgagcctccctgtgcggcagtatctatatacaattggagatgataattggtgctgtcgtagtgttgcaagggcggaatgagtgactgtacacaatgcttggatgaatacttgacatacagcaagtagccagcccacctgaagtgtagtggttgatgtttttccttgggaatactcagctgctaaaagctaagtatgtctcttcgtggatctgaagacttggaacagaccaatttcaactccaatattctgaggatgttacagggagacagagaagtcagtctcatagtagaaagactgactggctcaggcatttaggaggcctagtttccagccctggaccttctactatgagatcccaaacaagttccttttcatcccttggccttgctttccgcatcaataatccaagggcttgccagagttgtttttctaagaagatttccaaagctaatgcccttaaattttgtgattcccctatctctcctcccagcctgccccttctgttcccctcggcaggagcgagcgaacatgagtggttctgatacatattttccttcctttccaaatccaccaggtcagcacaagaccaggccctgtcagcctcttctagctcatagcttctgcccagccctggaagtgccattctgtaagagaaacaaaaccttttcctccggcagcttttgcgtgtgttcacctgtatttccttctcgcaatcctggcccccagcactttgaggttgcagtttcgttgtgagtcaggcctgctgagagcagtggaaatcagaagagcctccacttggtaggggaggacgtgatgctgccttttcctcaagagcatggccccgggggcggcgggggtgtggaagggaggtggtcaccttccggaagtggatttctcacattgactgtttcagggagaaaagaagattactggaaagccctagaaagcgcttcacatctctttcagaaagaactttgcgttctcaagcaattatctgcaccacgcagtaaaatgtctgtgttgcgttgatgcctgcgcgacgcaggcctatgccgaggaggaagtgttgttggtgtacttggctcctgacgtgggactcagataataaattcccttgagagaggtgaccatgggatcctggattcccgtggcagagcacagtgaggccagtctgggtgctggttcagtcccaggagttgccagctgctacgggctttgaagtattaaagtcccccaatgcctccattgtatcccatgggaaaaggcgagcaggcagggaggaatggccagtgctagaaacaggatatctgacccctgtgaaaaccactgtggatgaatactcgggtcatgcaggctctggatcagcagattcttggatccttgaaggagggtccatgcaggtagacttcaggtagactgaagacccatggaacacaaacatatatataatgcaaaagaacacatacaccacccccaatttagaagtgcctgttttctatggacttgagtggcaaccattggcacttccttaaccgtgcttgtgagaaatcctttacgaaatcaccagcaacttctagagagtcaggaggtcaaatacagtggtgggaaagaagccatgaaaataacactgaaatccctgggtggttctaatcctggaagctgagttcctgtggggctgatctgtgagctgggacaggtggggaggagagtaggtcatctgggagcatgtggttaagcagagcagaaggttagcatttcaatggagggcttacagcccctcagaggggaaagtgcagagggacctccagagagggcagccagggagagggagcagagtgtgacagaagttgacccaagacgacctcgactatttcagatgttgcctgaggctgttcatatgtccagtaggagaaagaagctgtcctttgtaaatctcatagacccccagctcccaagaacctgaactaagtttggtcctatttatagtgtaacccctgctttgtaggctgtgaatgaatcaacatttataagtagagtttctacagagatgttgctccagtttccaaaaaagtgacttacagacatctgtacaaaattggaaagctacctgcaccgaagtgtataaacatatatctggtcaaaggggtcacaggatgtaaactgtgtgttagggaggggtggtgacggggacttggggtggggaagtgaaaggggagggatataggacatccttagagggtatcatgagcaagctggcctcaccaaagctctgccattggaatccagaatcccatgtacatctttaccaaagataccctatcatatctgtaagatggaaaacataatgatacttacctgctggctatgagaaaaaaatgggaaaaatgcttgtcatagtgcacggtttatagcaagcactcaatgacttttacctgacaagccattgcttactctgcaatgactgtaactgtactgagactactacagctactacggccagtactatcacgacagctatgactgttgatatcaccacaatttctctttctcttctgggcttcctgaaatgactgaacatccaaagattggtgcaagtggagggagagttagtgtccccacagtcctttctgtgtgagtgagggttggctggggactacaaggcaaggttcttggtggagtgggaagcaggagcttctggtcactgtgaccatagctggggctgctgtttcatttcaggtaaaatcagagggctttagagtaaacaggaggggaggaggagagactgagttgcagcagcccacgttgagccagaacttgcttctctattggctgcagtggtgggaaaattgaggttgaggctgctattgccactgtaaccaaggtgcgggcctgtggaaatggtgcaagggatgctgagctcttcatattgacctcacccttctccccagtacttcccagcctagctgagctaaaggccacatggaggtttattcagctgtagttactgccatcaacattctgagaacaacaaattaacatgttaaattctgctctccagcccccaagccaccggagaacagaacgcattcttaaagtcttagtttttccaaaccaccaagccaggttcacttttcaaagcactcattttatcagcaaaactccactctcacaaagcccagggctttcagaacacagcccaacctagcttgacatttgcactcccaaatgccttcacagctttccttcccacaggttctctccacaagatctctgaccaaaacacgggggctctcactattgtcagaatatgccctgtgctctcccacgtccttacttccactcatggcttcactggcctgcaatgaccacccttccttttcaccaacagaattctttcaattcagcactgcctcttccatgagccttcctttaacaacctgactccactgagatttcatttttaaaaaaatcctccagtgcttatgaccatccttggcagtactttgtgtaccctgccttagagttgtgagatgtctttgcctgcatggatgcatgtgtgcacatatgcatatgtgtgggtgtattgtgtgtatttcatccctgtggactggacacatgttttatatatgccagagatagagaggagatgcagtctagcttggtgtgaatattttgctcattttgactaaggcacaggtttacgattctcaaatggtaaagacctaggtccgggaaaaggaggcctgggtttcggtctttcttctgtgtgactgtggagatgtcttccaccttcaatgagtcttgatttctgtctctgtgaaatggagagactcctcagttctttctcctgctttacagaggatcaaagagatttgtcaataggttgaaatactttaaagccataaaatagctaaatacatgaaagagcccctctgtggtcttgtctttgactcaagaagggaggctctggtggcttttctcagaaccagcagtaggactaggatccaggagtttctcctctccagccatgccacataccaccaagctacacaatcttttcctgggctgcgttatcctttccactgcaccatgtggtgcagccccatcaggtctcgctttcctttccaccagccacattcatagccatgggaatccgtgtttttcagcaagcttccttctaaaatccccctctgcccagagttcctggggaccctgtggaccttccttccttgtgacatggttggggaaacacactggtctgcagacctcttattcatcttcacgatcccggaggtggcttgagcaatcttatctgttgtgtgagtgtgctcacatgtgtgtgcgtgtgtgactctttgcagctgttctatgactaactgatgccagctatctgatactgtatactgtgtgcccaccatatgctatagactaagacatgtcctgacccaagccctagaccccaagcaaggccaatggcaaactactacctgtcttagttggtttcccctattgctctttgatgtcttactatatacaagacacttcatattgtttcattttaagttttacaacaatctaaagatttgatccaatcattgaatctattttatagtagcgcaaaataaggctcaagtctcctgataatcagttcattcctttacccatatctccatgcagagacaaataatgtgacgctaataattaactttttttttttatctcaagagctttagaggtacaagtgatttttggttacatggatgaactgtacagtggtgaaatctaggattttagtgcgcctcatccaggcctctgacacctcatccccttccctcattgcccctcactgccccaggaccagattagttgaggcagaagcagttggaggtgctagaaaagcattagggttttcaccatctccagaatctgcttagcacatgtctcaacctaaggcagtgcaggcaggatggaggcaagagccttgattccatagcggtttctcttagcacagattccagaaagttgaggatgacatgatagatgacccttgatatctttcttcattcctttttgctaagttattctctgttgtgtggtgcctgtgtgtgtaaggcatttctaggcagaggagctttcctgggtctggtcagttttaccatctcatctgctgatcaagatataaaagatggacagtgtctgttgtttccaccaataatcagataccagtcagaatgctagagtgaccttttccttttccgccttggaaagaaagagattgtttcaaggaacagctgtagggttagatagagaggactgactggaaagtgatttgatgatctgaagtcctggcattccatgaaggttgctctgggcttatagtacagtacgagagatctttgttgaactgaagaagatgctctgaccattagggtcattagacactatggaaccttctcactgaagttccctttttggaaactactaaacattgtacccaacaggtaattttaaatcccttatcccctgcccttctgaggatccagtgaccattataccaccccttatgcctttgtgaatccatagcttagctcccacttgtaagtgagaacatgggtgtttggtttttgattcctgagttatatcacctagaataatggcctccagttccatccaagttgctgcaaaggacattattttatacttttttatggctgagtggtactccatggtgtatatatgccatattttctttttttatgtttcagtagtttttttcgacttttaagctcgggatgcatgtgcaggtttgttacataggtaaccttgtgtcatgggggtttgttgtcttactaataactaatgggtattaagcctagtacccattaattatttttcctgatcctttccctcctcccaccctccaataggcccagtgtatgttgttcccctctatgtgtccatgtgttctcatcaatgagctccgacttacaagtgagaacatgtggcatttggttttctgttcctgtgttagtttgctaaggataatggccttcagctcctttcatgtccctgcaaaggatatgatctcattcttttttcactaatttgttggtggacacttaggttagttccatatctttccaattgtgaattgtgctgcagtaaacatatatgtgcagttagttgtctttttgatatatatagtgacttcttttcctttaagtagatacccagtagtgggattgcaggattgagtggtaaatgtgcttttagttttttgaaaaatctccatactcttttccataaaggttgtactaatatacattcctaccagcagtgtataagcgttcccttttcaccacttccacaccggcatctattgtttcttgactttttaataatggcctttctggctggggtaaggtggtatctcattgtggttcttccaataatttttaaaaggctgaaaaatgtcatcagggcacggtcctctcattgtgccatcctctcagtatcccagaaaaaaaactgagccccatggcacgttctgtttctgtctctgattgtggcctgcttatggtcattccttccccgtctactgcaggggaaggaaaatacccagcacctcccaggtagaaaaagagggaaaaaatgtaaaatgtaaaaacccaagctcggcaactatagaagataaacaacgttgagtctcagtatggttcatcggcagaattttccccagagccaacggcctgtgtcagagctatattttccactccggctactgtgatttggttgtggcactcttggtttctttcattttggtggagacagactctgacgcaagtttaaggctctggcaggtgtctgggggtttacgaacttgtccgggcctctgacacctcatccccttcccccattgccccccactgcccaggaccagattagcggaggcagaagcagttagaggtgctggaaagttgttagggttttcaccatctccagaatctgcttagcacatgcctcaacctaaggcagtgcaggcaggacgcaggcaagagcctcaattccataggggtttcttttagcacagattccagaaagttgaggatgacatgatagatgacctttgatatctttcttcattcttttttgctaagttattctctgttgtgtggtgcctgtgtgtgtaaggcatttctaggcagaggggctttcccacatctggtcagttttaccacctcatttgctgatcaagatacgaagatggaccgtgtatgttgtatccaccaataaacagataccagtcagaatgccagagtgaacttttccttttccttcttggtaagaaagagattgtttcaagggacaactgtagagttagacagagaggactaattggaaagtcatttgttcattatcaggatggagctgggcaaattcccagcagctctgctgctgggtatgaccaggaggtccttaggtttttttttttttttttttagatggagtttcggtcttgttgaccaggctggagtacaatggcatgatcttggctcactgcaacctccacctcctgggttcaagcggttcttctgcctcagcctcctgagaagctgggatcacaggcgccggccatcatgcccagctaatttttgtatttttagtagagatggggtttcaccatgttggccaggctggtctcgaactcctggcctcaagtgatctgcccgccttggcctcccaaagtgctgggattacaggcatgagccaccatgcccagtccctatgttttgactttggctgtctgcacactgtgctcagtcccaaagcttcctgtgccccatgcccagccccagtggcctctcactagcgttttggctttcaaagcctcagtgtggtttccttcaccaaaacttcaccctcatcagaggctcctttctcctccccctgtaaaagccccgttttcttaaaggtaactggccaactgaacacttttaaaaataggttgtaactgcacctctcaccatcccagaaaaagacttgtagttttcactggtaatatcccagacagggtgtctaagtaaattggaatgttcctggtcctgtgcatgtgtgtgtgtgtgtgcatttaactgtgggtggggaggccctgggtcttcccaggctggttggatttatcatctcttctgcctttcccaacatttaagatgggcagtgccactcacgggcagatgcccacttctctggaattgccccatcctggtaatatttgtggcttctgaaggctgagtctgagatgccttctcttggttccaagattctgagaaagcctggggaacagcataaaaattccaccctggaaatagtatacaagcaaaccaactgcccacccacttcctgagtgaacattgctgagtgttcctgagtcaggggcagacctaaattccttaaccatctttttcttccctttcccaacctggcacggcctcatacccctctgcccctccattaaaggctgtatttatgagcagtgatggatgctccctgacagggccaccctagaaaaaattgtgtaatgacaaaaacatgatgctctgattgaccctttgtggtttagtacattcacaatccccccaccccgcctttttttttctgagatggagtcttgctctgtcgcacatgctggggtggaattgcatgatcttggctcactgcaaactccgcttcctgggttcaagtgattctcctgcctcagcctcccgagtagctgggattagaggtgcatgccaccacgcccagctaatttttgtatttttagtagagacagggtttcaccatgttggccaggatggtctcgatctcctgacctcatgatccacccgcctcagcctcctaaagtgctgggattacggaagtgagccactatgcctggctagatgtatgtacctctcttaagcccatcttataggtgaggaatctgagttcagagaggtaatgtgcccaatccaagcctacacagctgataagtgtcagaaccaggattgaatcctgggcagtgtggctgcagaggccacactctgctgtcccttaacagagctatggggaactaattggcatataattagctgaaatgaagtacttcgtggtgcctggcacaaaggtaccacaataaatattagttcccttgccccaagaatggtttgcattttaatgactgtggaatgaagggctttcaggatccattagagttagaaggatttgcatctgagtgcatgaatgcgcttgtgggacacccacgcaagccactgacaatcctcagggttggtcagccccatcctcagaggtttatacctggagctaaatcccgacggggacttctgccgatgacttttatagcttctgacatttcagtctcttcatctcagggagctggttctctgaggactttgggggtaacagttttaaaaataatgtaaggcagctggtgatggctgctttaggggcagcacgtgagctgggccccaggaggggaaagccatgaatcaggggtcatgtagcaagacagggctttcctacgggctggatttggtcagcatgggcccctggttcccttgagggattccccgactgtgcggcctggcagtcgtgctctgatcgaatgcctccgattcccccagccggcctgactcaccctgcatcgctcagacctctgtcaaggtgctgctcggagagtcaaagaggctgcagcaggcaatccccttgcccactgcaaggctggttgggaggctgaacaaaatggcacatcctctcaagtccagaaaggttgggccttcctttcaccctccattttatgcctggaacctcaaacaacagaaaaaaacacgaggcagaaaaaaataattataataattattaatgctttctgaacctctaacgccactcgattagtcacagtcatagttcgagtgcttgttatgataacacctcggtggcttccttaactgttggtagtgattaatggcatcatctggtcgaagggctagggaggagtgtgcctgttgacaagaaagaggggctgagtagcaggggaaggagagtggggacagggaggtgtgggtggaagcctgggctaaggctagcgttacagcacctgagtcaagagggcagatccctaagttagagaccaccacttaatgttccaaagacatctagggactcctgggtcatggctcttcaggtggtggatgggcaatgttctctagtaccttggacaccatggccaggccaatctcatttcatcaccatcaccttcaagttattccccagtttggtcattgggagagacttctcattggccaccagaacaactctaaattcatatgaacctttcagtttccccacctgcaacttggaaataaagatactgctgctcttattgggaggataaaatgaaataacagatggaaagttcctggcacggcatacagtaggcactcaatgcgtggtggtttatttcactctatttctgtctacggtccgtcacatcttacacttcattgtctgtcacctgttccatgactcctgccctgcctcccacacattcactgattcccatgaccccgtgtccctcctttgtgaagcctcttcccactgttccagctcacgtcgacaccccctctctgagctcttatactatggttggccccgggtcctcctgttgggtcctccctacttgtagcatgggtgtaagtttcatcttctcacgtagattttagcttctcaagttcaggaactgggctcattgcttcttttgattctcatgcctgacaagtcacaaggtgagcaataggttctttagaagagacctgcgaggtgggtaggggtgggtgtgtggcaatggaaagttacccaaagtaatggggaaaccatctggggcacttctgtttggggatttccctggaccacattttgtgacctgtaccaagcccggtgctttgtcaagctggaatcctgctatgctccccactttccatacctatttctgcccatggcactcatgtgaattggcaaaagtgctgtgggatggaaaatattggaatctcagggaaaagggtcagtgagtgcatccttcagggcaggatgtggggtcccaaaactgctttgtgcctggcagatcacccaaacacttcctccatttccccatgccagctaaagcaaccttggctgttatgctctggcccaggtgtctttcagggcctttcattctccacacaaaaagcttaggcataggggccagtctagatccagacacaagggccagctggagaattgggaagtacagtaacacctggccaccaaggctggtacagttcagcctgacaacagtctgagggcagtagtctgttgtgaaaggggacagatatgtcaccttgaagctgcagcacttttctagaccaagcccaccttcttgaacatttcagtctctttgcatccagctgggtgtattctgtcatatacacaagttgcctttggctctgaggctgctttataagaactagtcctggatggtgtttggtcagggatgaggtttgagtttgctcagcccaagcaggtatgcttaaattactctcagattggatgcctcaagagcctggcctactcctctcctactgaccatctgttttctactcaacccaagccaactcaccatttgactccttcccacacctttaggattgtgaactgtagaatgctggagttggaaggagctgtagagactagctagtctaccttcttcctcattctatggatgggcagacagacccaagacttggggcgatttgctatgagcttcttacagcctctgcatactacacatggataactgtttaccttcctgctcctggatcagagcctgccctcaagttatcccccatagcccactcttgttccatcagttgtgtctgaatcaaagactcccttctttttattccttctattaacagccttaaaactcaccttccccaagaagaagccttctttgattaattcagttcatttttgtatgaggattttccagagaaacagaaccaatataaatatatatatgtgtgtgtgtgtgtgtgtgtgtgtgtgtgtgtatgatttattataaggtataaggtatggctcacatgattatggaggctgagaagccccatgatcacctgtctgcagctggagacccaggaaagccgatggtatagttcgaaggccagttggagagtcccatggtctagattctagttcaggtctgaaggcctaagaaccagaagctcccaggcaggagaagatggatgtttcagtccaagcagtcaggcagaaaaggggaattctcctttcccctacttttttgttctactgttacgctttgtagatcagaccatgcccacttacactggcaggggcaatctgcttcactcggtccacaacttcaaatgctaatctcttccagaaacattctcacaggcacacccagaaatcatgcttaaccagacatctggaaatcctgtgattcagtcaggttgaccataaattagccatcacaatcctccattctttacgaggctggtggcttgtactatgttaattttcacttaccattgtttttcccccatgagttcctgtaggattacagccatacaccaagtaatggtgtctgtcaataatggaccacatatatgatggtggtctcataagattatgatgctgtattttactataccttttctatgtttagatatgtttagatacacaaataacctaccatcatgttacaattgtctgcaatattcagtacagcatcatgctgtacaggtttgtagcctaggagcaataggccttactgtatggcctatcttattgtgtaaatacactctatgatgtttgcacaatgacaaaacctcctaataaggcatctcccagaacatatccccaccgttaagtgacacatgactgtattttaatgtgttctatatcaccttcattagtctggcagcttcctccaccattctgggaggcccagacagtaatggctgtcttgtgatctttgtctggattctcaccctttgtccagcccaggactacagactcagggatgttcacagcccagtaaatgggaagtattgctcgaaaaccggatcacaaagcctccttgtgctgaggctggggtaagacttggaggaagaagaaccttccctgactccttcgctggggtcagcctctaagggtcagggctcactccctgcagtgtagagactttgctgcgggacaggatgtgaacatccttggcttttgcatggtcaagttaagtcacttgtccggggtcatagtgacacaatcattgccaaacctgttcatttcaccagggccccatgggattttgccaagtcagtcctcctttgtactttcttgctcaactggtgtagaattctcaggcaggaagggaattcatggcggagggtggggtgaggtggaggtcatgtcgtacatcctcctaagcagacacatggacgtcagaggcaccagagggtttccacattgacctgcagtcacccatttacacatcccccacctccgagagttcaggtattcttgcaaatgtctccatttctgctactgtagcttatcctgagccctttactgtttttcctggaaaacaagaaaatgtttgggaatttgtatattgggaatgggcaggtgtctacattcatttgctttaaaaaattatttgaaacattgccctttaaatggaaaaatcattttcctgatcttttttctcaaggacatttcctgctgcctcctccagacctactcttatcactcacaaaccctagaggttccgtggccaaaggaggacagcagctggccatttcagactatgtccccacagggatcaggactccctgggacatgatgggagtctggagaaggtgtcgtggttggcaggaagtgccacattcagggatattgacttctggctctttctccacgtgactatgagatgaagcaatttctgaagagggttaagataaaaaccttagatgtcatccaacctaatccctgattttacaggcagaagaagtggatttcagagctagctagtggcagagccgtgactcacaggccacagacctcctgacaggcagtcctttctcagagagcccagcaccttctgtgtttggttgtgttgaggtggagttgaaggaggaagcatggcacacctgctgtaggtcatggggacagatgacattccccagacctcttgctgcctagttcctcttttaattttttttgagatggggtctcactatattgcccaggctggagtgcaatggctcttcattcataggtgcgatcatagtgcactgcagctgcctagttcacattcttcacctggcccgttgttccatccagtcttgacctcgctagcctgcagggggcgtgtgcaagcccacactacagcccaggcatcccctctgcaagggaagtggtgctgttgtggacctgcagtccttggggggcttcaatttgtatagaaatgacaaggacagagcaaaggaaagtgggatttaattttaagcgcccaccttcccacccccaagtcaatttcctgtgacgctaataaaagcttcaggatctcttactttcattagtcctttccacagccaaagtaattatatacacatttttttttcttaaaagacagttctccctcccattatatatgcctctgggccccataaaatctggccaccctcttccccgacccgatttaccaaatgtcagagtcccacagcgcaccgagaaacaccactgtcctcctggagctctcccacacaatacaggccttgactgagggtgtgattcggttcagagtagctgggttgaatttttgtaaagaggttgccgtgtgtgcacttttgccgacctcaaagccaccagaaggagggagctgagtgtacctttttgtaatgatgactctctatgattttctccatagagcggtgcttgcacacactgacaggagtccaagaatgtgcactgagggagcgtttccgcacagatctgcgtgttccttaccactcacacatgtgcacacacatatccatgtgtgtgtgccagtgctttggggctctgttccacggggtaagtaatttctgctatagggaccctggatgtggagccattctctgggaccagagatatccagtttatttcaagactctggaagactgggttttcagacacctatgaactgacaggactgcctttgtctgtcataaagttccttattgccagactgctggccaggtttaggggagaagggggggtcaccatactggagatgctgagggtgagtgagggagtgtagggtggaaaggcagacaaataaaccatatctgcataccccttccccatcagctcccatactggtcatggcccatttcttcacacaacaagagtcttcaccaaggttgctagctgcaatggtacagtccagctagctgcagcaaaaagggggaatttactgtaaggagcctggggtgtctcagaatatccatgggatggaagctgctgcacgacacagagggactggaaccaggagcagaagtcatcagaaagccagaactcagcttctcgctctctgaggccacgtagtcactcctttctgcttttcttggcagctttctctgcatctctgagcagtttgcagaggactgcaactgcacagctctagaggctaccagtctttaattcaagggaccagccaagactgactagtgctctaaagtcccaagaccaaattactgggagacagagactaacagaacagcttaggtcagttgtccactttccaatcagctatagccaggagaccagggtcacatggctgcctgtggaccaaggtcagggtggaaaacatcatcaatggtgtcccaagttaaatggcttgtcctctgtgaagaccctctgatcaatcctatggaggaagtgacctctctcctgaatacccacagcactttctcttcttgacatgtattgctttctatcttgtgtactattatttttacaaacatctcatcccctctcccacttatctataagcaagtttgtttatctccatatatttcacagcttgcacaaaaaaagatatatttaataattatccaaagtcattgataatcttcagataaatcaattttcaggaacttaagcaacttggccaagtgtttcatttcactgaattgtccaggcttgattaaatgcaattaattcaaccaatttttattgagtgccttctacacaccagactgctgaggacacaacactgaacaagacaaagtccataccccattgagcttccagtgtagtggtgaagaccatcaatcagtcaacaccgtttcctctaaactaggctttcagctgggtgccaaggatagaaatgtgtaagtctccagcattgccctggaggagttgtctccctggggcagggcagtggtggtggggtaggggggaaggtcacagatgaatgctccgatatgttgctgtgcaacatgacagtattattagttaagggttggggaggaagtgccgtaagaccccaaagagagagtgatttaccacctggaggaggagggtgtggtcaagggaggttttgctaagaacagtgacacatgactgaacttgaagggtgaataggagtttgccagggagagtgggagttgagtatgtgagtgtgcatgtgtttaggaaaccgggatggggaaaggagacaggaatgatggtgatcaagcccttccagatgaagtcatttatctggaaaaagattttaggcattgtgaaagagctgctgtgtctggaggaaggtgagacatttagtatatctggaacacaaaaaatatggggaaaagaatggggagattggccctggcccctcctggccgtgtgtgttaagtccgggaggcagtgggtaagtagccactgccaattgccttggggtctggaaggcaatgatgttggctgggcatgaggaccaggcacagcctggagaccaaccacctctggccagaaacatattccagaaggccttaggatgagacattactcctgcctgtggtcgttgacctctggcttatggagcgagatggctgcatgctgagattctggtgaaatttgtcactcccaaattgcaaccttcctcagaaagcactggatcttctaactttcactctctccctagtagagtgggattttctaaattttgcaattgaatttaagaaatcaaagaaagttgtccattcgtagtttaaaaaaaaaaaaaaaccacagatgtctgcctccagacccctgtgtcctttgaattacaagcctgtagcccatggccttctagccaatgatatgagtgggactagagatgagggatttccatggactgctcctgctctggaatgttccttggagatgacagatctgctctccactgtcctcatgtgcctggaggcggggggtggaatggaggcaacttcctggacctttccctggccagactcaaggccattggcacctggtccttgtctctttccagctctgtctctgtgccctccccattcctggtcagcctccagcactgttggcccaactgcctatctcagacctctatggctctgggtcagtcttagacaaactactccctcttctctccctgtcaagcatcacttatccttccggtcaaagttctgtgtctctataaaggcttctccatcccacctgagtcagacccaagagctccctcttctgtgctgtcccagcacttttgagtcacttctattattacccccacttccttggaggacagttatctgttcttatgttcatattgttcttatgttcttaagtagactgaatttcttggggactagaccttaatcatctctatatccctggtcatgagcaacagtgcctgacacatcacagactcacaatacatactctgtttgtcaatgaagggtgattacctgggtatcttgactgttgggattgaggtaggatgaaggcagctttgggaagaactccagtgagcagaaaaagggaagggacatttgggtggaagaaacagtttgaacgaaggcacctccatagaaaggcatggacaaacatgggagcttgcaggaaaggaggggaaggggaggctgcagcacagggggctcccagcatggtcctgggctccttgtgtgcatcagtgaatgcaccaggcctttgcagaaacttgatgtattggcactgatccatagagaagggaacagaggcccaggaaggaaggtcacacagcttatgagttggtgatggagatgggattagaccattccattagactttaaaacacatggcttattggggccctagagaacacctagtaattcaggttgcctggtgcctacagtaagtcagtaggttgtgagaggaaaggtgtacatgacagaattatattattcataatatctgggtggtttttttttctgccttccatgtaccaaaacctgggctaagcatttttatatattacctcatcaaaacgaacagcacctttatcaagcgattacccctattttacagataaggaaactaaatgtcagagagttcaataattttcccaagatcacgaagccaataagtgatggagtcatgacttaaattcaggtcttttggtgacacaacccagactaattgggaaagagcttcatgggtaaatcgtgagtcatacttaatttcaattcctggtgacataatgagggtacaaattttcaattttttttttcttttttttttgccatgggcaagttccaagcctgggcttctcttccaacactgtccctcccttccctgtatagttctgctcacttgtcctgtcttcttgctctgtcctctatgcccacatgtatagaactggatccccaatcaaggctaactgctagccttaaagaaagaccaatcttctggcagataagaaggactgttaaggaagacgaggggacaggaaagcaaggggaatgtcaaagaaataaggggcctggccaatatctcaagaacagaagcagctgtggccctggaagggcgagggggacgtcatttccttttccagatcccttttttcctttgaggttcagtcccaaatgggtaaagttcaaatactagtcttactcagaattccctagtcctgcttgctcaaaaggtggattttctggcctcactccaatcttcaaaacatctttttgtggggcttgagagtctgccttttaaaatagcaccccagagagtctacacattgagggccttggcttctgtaatgcagttacatccatgggctttcgctgttgctgctgagagaacttggggtgccaggaagtcggggttggatgccttccagttccctgccctaatcagaggcattgacctggaggccctgtgtaggagtccccatctttcggaattagtgatgtggttagagtagcaacgtgactctctgtggacggaagaaggtaggtcggatgtgagagtctccctccatgaacatgtgtgcgtcatctgagtcaaagcttgtatctttactctcaaaaacaagtcatttttgttcctgtcagcatcttggccagcccacaacaaagagtacaagctggatgcttgtactgtgctgcgataaagaggcccagacacaggcctcaggtgatcctacagagcatggctggagagaacaggaaaggattattcccctgggggctgatggggctgccttcagcaacacaaaaacatgcttacagaaaactgctggaggacataggagtgatctgcttgcaatgaggtttttcaaccaccaggaatggggtgacctagtccagagccctctaataaagtgactttcaaactgactgcacttcaaaataatcctaagctttaacaaatagagatgcccaggcttcatcccagatgtacaaaattcaactctcagggacagggtctgggactctgtgcaaagccccctgggaattctggaacaactaatctggcattgctctaggaaatagcacttggaaagcactccagcaaggtgggagggaaaattattccagcttgaacactacaatatcaagtaatcctttctctcttcgccctgtctcttcccttccctttcttgctctctgtaacaggcaggaggctcagaagagcttcttctctcacgcttcttgcagggcagtacagggaaagatgtagctgtgtaaattccaggagggcttcaggtatatttaaatatgggttgcttgccacattcacctgcctatcaagtttgcagatgacaactgcagaatgtggcacccaggtcttgaaagtcatgaagcagaattggataacatctgtccgagtcatgacaaagagggttcctgtgctgggagtgggggctaatgaacctggagatcctttccaacacagacattccctgatgccaatgataaccttttcaaattgttgttttcttgatttttatctgtttctggcacctcatttgattccctatatgacaataacccccaggttgagtgcactgaaataatttaggtaatgagaagctgaaagttactacagatggaaggaattagggtgtataaagtgtgcattgtgtgagtcataggctgtgtctttaagcaacaagcttttattggtgtcagcatctttccaggtacaatgcaaacccagtgagaatgagatttggggtttaaaagtgtttctgaccagagatgcctgagggaatgacccagggatcaaacagagatgcaagagagcaaggcttcaaggaaactcacctcagcctgtttcctcaactgctttccgcacctttgtttgcgggtggaagaatagaaaatgggcttgaatttttcaatctaaaattctctgttcaaacctgaaattctcttaccttataggaagagcagctgtatctttcaaggatagaatgggtgctaactgcatgggtgaaattatctgaatcccagagaaatgctctttagaagaatccaccagactccttcctttctaaatcatacccttctttgaagttcctttcaatccttggatcctctgtggacactgttctgatcattcaagcactaaatgatcacctgctacctgctgtctgcatacctggctctgcttctagagtacacacctgtatcggcacaatttatttagctattagtcatgtatgtgtttctgatagctctcagttagctgcctgggatggttatttacctttttgtgctagttttaccttctcaatgggactttgagcaaattaagagtgaaaacacatctgtactgatccgtttacatgtccaataaatagattttagtgccaacttgtgcagccattgctctaggtcttgatacagatatataccaggtggtagaggctataaagacaaagcaggctaaggggagttaagtgatagattcaggaaaatcattgagctgaaaaatgaataataacctcattcacttttttctgtttatcaaagaatgccatatgctagatgctaaaacaatttacatctgtgtgactagagcaagccattataaaaaggaaacaatccaaatggaagaaatattttatcaggctggaaaacacagttattgaattaaactccaaaatggaagccatagcttacaaatggacactgcagaaaactgaattaatgagtaaaaggcaaactgaagataaatttcctagaacacaaaagcaaaagataaagaaatgaaaatgaaagaatagagtaaacgtgaaatacagatatcaaagagctaacctacacataacaggagttcctaaagataatgaacagattcttttggagcagaagccatatgtagaaaatataatggctttaagtaaaatcttattttaaaaactgaatgcgcttactgtattcatcaggagtctggatcgtgtcaggctcagttcaaaccagcttaaacaaaaaaggaattttgctggctcacttaatgaagtccaagggttcactaggaatccatccctgctgctcttgcttttttctgggttgccatcattcttgggagggttgttcctgtagggtgacattcagtatctccagactcacattctcccagtttaccaatcccagtggaaaagagagttctaatacatgtaccattaaccttgggttaatcctcgttgattttgattggcttggcttgggtcatgtactcacccttgaatcaatctatgcaattgagaagcgttgttgccttaatttcaccggcagcacacacccactcctgggatgagaggatgggtcagctttacctagagtcatatggactgcaaataagggaaatatcatttcccagaggaaaatggggttgctactttcagaagaaagggggatgaatgctaggtaggctaaataacatcacattggcagatagaaaagagctactactctgaaatatattcaggtagaacttttacatctaaaatactacaaaaactcaataaataaataggcagggagaaaacaagtcaagcatttttcagatttattttccataactctaaatgtgagaagacaatgaaacaaagtattttaatctgtgaaggaaagaagttgtgtgacctgagaattctatgcctaggtaaattgtcactcataacgtatgcactcggaaaatacaattcccggaactctccctgagcaagccagtaaaaaatgtatcacaataaggataaattagagttggtacaaattatcacccagtcctatcattctacctctgaaatatattacgatttggtcccctttccactatcaatctggtatcgtgttagtccaagtcaatatcatattttatccggaccactgtcacagcctattaagttgcctgtctcttccactctcaacccttctaagccattttgtacatgtcatccaatggtctagtaaaccagatcatgtcacttccttgcttaaaataattttaaagcttcttatgggtattagttcgttctcccactgctataaaaacatacccaagactgggtaatttataaaggaaagaggtttaatggactcacagtcctgcagggctggggaggcctcaggaaacttacaatcatggcataagtggaagcaaacatgtccttcttcatatggtggcaggaagaagtgctgagcaaagagggaaaagccccttacaaaaccagcagatctcatgagaactcacccactattacgagaacagcagcatgggggtaactgctcccataattgaattacctcccaccaggtccctcccatgacatgtgggaattatgggaactacaattcaagatgagatttgggtggagatacagccaaaccatatcctatggcatgtagagtcaactcaagttccttactatgaccttcaagaccttgcctgattccacctctgcagttattcccagcccagccacactatcctctactcaccatgctatagtcatatagccactgatcagttcttgctgtgcacatgctaagctccttcttctctcagggccttcactcatgctgttccctcaacctggaactctctcccctcaaccctttcttttcctggctccttctttctcattacatctcagcttacttatatcacctcttcagatgttctctggtctcaaaatctgaaaataagtttcctttgtttttttggcacccttatttcagaccactaatcacaaattgtagctatatatttatgtgtttagttgtgttacatttgtcttctcttagagtatgaaccccacaaaagcagggaccatgtttattttatttgtcactgaattcccaggtcttagcactgtgtatgacaaagaaatggtgtgcaatttatatttgtaggaggaaggcaaaaagaaacattgaaatggtgtaactatatatagaagcaaatatatagaaagaagttatgggaattgatttaactataatttctaaggtgatggtaaactttttttctattaaagagatgaactatgatgttaaaaaatggagcagaaagcatatttaaaacagtaaataaacacattcattatatagtgcttttggttcctaatttggtgccataaaaattgatataggccaggtgtggcagctcatgcctgtaatcccaacactttgggaggctgaggcaggcagatcacttgaggccaggagttcaagaccagcctggccaacatggcgaaaccctgtctctactaaaaatacaaaaattagccaggtgtggtgatatatgcctgtaatcccagctactctggtggctgaggcacgaaaatcacttgaaccctgaaggcggagttgcggtgagccaagattgcactactgcactccagcctgagaaacagagcgagactccatctaaacaaaaataaacaacaacaaaaaacaaaccataccaaacaaaagatattgactgatgtgatgtgaagctctgagagtagaattaaccgtgcatgtagagtgactgtggccttgaaggaaggatagaattcagaaaattagggagaggtatgaagggaattgtgtgtgtgcgtgtgtgtgtgtgtgtgtgtgtgtgcccatgtgcacgcatggtggggtgaggtaggaaaaaactaggtgagcagagatctggcactgagacagagtaaatggagtgaggtgggagggtgaggagcccctaagacttccaggtacaagaaaactcgcggtaggttaaactcacagagggtagtgtagaaagtgttgccatgaggacaaagcatccaccttagaggggcttgttgctatgtatgtgtgcctgcagttgacacaagtcttagcaggagtcctaagaaaaggctcccagcccatttggtctgtggacaataaggaccccttgtggtgcaacaaagaaggtgagagacagatgtagtgaagaggctgcaggggctagagatgctggccaggaaaggacagcctgggtgggacatcatgagtgaagagggtgcatgaggattctgtatgacagagaaggaaggcagaaggttctggaaacaaacttgtactactccccatgaactcaaaagcaggtcttgtttagggagagagagcaaagctgctctctgttcttggcaaacagtctttgtatatgttgatcatgatgtccctcaaagcagcccccatgggtgttgcccccactgcttcacctaggagctgtgaagagtggtagatacagcattcctaggcagcagacctgggctggaatacctgtctctgctatttgctatctgtgtaaacccaagctggttcattatcttaagactgctctcatctgaaaggaagggataataatgcatgatttccacatacctatgtgagatctccacatgtgataggctttttagtctgtactgttagttgtacttggtgtggggtgggtgggcatgaacttcagaagatgctgtctgtgggcctgacctccactggcttttcctgcaggtcttcactttagctcagcttcaagggaagactctgttggccaactgggtagaatatttctctgcccagcccacagttctggtagggacttcaaaagatgattttatactgcaccattgtagactgaaaaagtaccataccaacctctgggcatctaactagttttaggaaaaccaccagaaaaggtgaatctgccctcttgatctactgtaagtagcatgtaaagtataaggcgggttgtgcaattggcactagatggcactgtagcagcctgggtgcattagatgagacctgcttcaaacaagaaatatagtagctgggaggtggggttgggcccaggataatgataaggacaaatttccattaaatgacttgcaagatactgtccttcatttataatgagtctgacaggaacttccccagattcatcagtagattgcatgttgcagctcagcaatcaccaccaggtgtggaatcaaccatcccaaccacgtttgtgaaaaaccttataacaacttcacttggggcagtttccttcaagggaatgaattctccttctcaagacccatcccaacctctctttattgccacttgcctcaccattagggtcggatctcacccttctttgggggttggagggcatggacaaagtccgactcagaatagtttatacactaaaagaagtgcaagactttactaataaatactggcagaatcttgggaaatatgtgtgagaatagattctaagggtgttagaccaaggaggatagactatagcactggattggattgaatttattgggggtatttatgagacattctgggtttagtgagctagctcttgtaactggaagtggctctaaaatttcttggttggctgactaaaccttggactcaatggtggcatatgttcaataaggctggaatgccagaacttccctgacacaatgtagaggaaggcatccaagacttaaggaggaaggaatgatggagtgactttatcacatgaaatctctacatctaccagcctcacatccatcccccagaatgcctagaggacaatcctttcataaagacattaagaaacacattgacgaaggtagcacttgcatctctgaaaagctctgtggtggctgtcttctataagccaggtatgatggtgaaagacacctccattgagttgaatctctgattttaatagaaatgatgagactcccatatagcagaggccaaatgctataatttaaccattagagacaaggggactgcaaatactgacatagtttggatgcctgtcccctccaaatctcatgctgaaatgtgatccccaatgctggagttggaggtggggcctactgggaagtgtttgggtcagggggacagatccttcatgaatggcttggtgccctcctcagagtaacgagtgagttctcactctatttgttcacctgagagctagttgtttaaaagagcatggcatctctcttgcttcctatctcaccatgtaacatgccccctttgctttccaccatgattggattcttcctggatccctcaccagaagcagatgccagtgcaatgcttcttgcacagtctgcagaactgcgagccaaaataaacctcttttctttataaagtatccagcctcaggtattcctgtatagaaatgcaaaatagactaagataaataccataaaaaacagaaagggcatagtgataatcaaactgttttgaaacctagagatttttagtgaggcgaattgatcatggtgcatctaggaatgaaaaagatggccagctactaaaatgtcatctgaactatataaaaagtttggtgacccccacctctactaaaaatacaaaaaaattagccaggtgtggtggcaggaaactgtagtcccagctactcaggaggctgaggcgggagaatggcgagaacccaggaggtggagcttgtagtgagccgagatctcgccactgcactccagcctgggtgacagagcaagactccgtctcaaaaaaaaaaaaaaaaaaaaagtttggtgaccaaaaacttgagctgcctttcattctatttccagacctaggccagttccagacttagaatctcttgattgaaggtggacaaatgacgcatcctgtggatttcagttaatatctttctccagctattcttgtgcttgctcaatggccctgagcataaagtggccataatgtcagggatgaggactatgcatggatttaacaacatggacttaccctagtcaaggcttttttgaataccaacactgctgaattcctagcttgccaactaaagtaagcctctgttatggtacaactccctaaaagtcccagccagcccccaggggcagattgattacagtgcaacccttccatcatggagggaaggaaaaatgtttccttagtgcaggagatatgaattctgagtgcagatttgctttcctgtccaaaaatcttctggcagctgtgactacaaaatatggtgtactgcatacaacatttcttctgatcaagaaagtaatttcaaaagaactgcagcaatgggtttatgcccatggaattaactggtacaaccacatatgctaatccccagaagcagatggcttaatagaaagatttgatggtctactgaagattcagttatggtaccagttgggagattacagtctgaagggatggggttctacattacaggatgtagattatactttgaatcacagaaccaactatatggttccatatttcctgtagccagactacacaggtctgcgaatcaggggtggaagagggactagctcttcacactctcacatctcatagcctactcacagaatttttgcttttcatccctgtgcctttgaactctgttggtttggagtcttggttcctaaggaacaaatgtctctaccaggaaatacatcaatgtcccattggtttggaagatgagactaccatttggccatttggggatcctcatgatgccaaaccaacaggctaagaagaaggttactctatgactggggcgactgattaccaaagtgaaattggattgctgccactccatgggcccaaagaggacaatatctggaacccagtgggattttctggggtgccttttaggattttcatgtccaatagtaaaagttaatggaagatgaccacttccccagcccctggctaaaggcataaccactgatgattcagacccttcaggccagatggattaccccaccacataaaaaaccccaaccgtgtgaggtgctggatgaaggcaaaggaaacataaaataggcagtggaagaaggaagttataaatataattatggcctcatgactagttagttgcttactgtgtgtatttgtatatattaattattttattctttcttcttattcatatcattttatacaggttttgttggaagttaactttgcaatttggtttttagaaaacatattcagatgggactgtgactgaatttgagaagtaattcaaacggatacaatgacttgagactttataatcctgaatttggggagaaggtgatgctcgcctgttttatatgctgaatagttgcattttgttgggaggaaatgaattgttttgtggttgtataaaagttcaaatttttgtggagcagtgtaatggatgctaaatagccaaaggggtggactgtatcagttattgcctctcagttctaaacccaaccttctatagtctgctttgtgatcctagagaccggaccctaaaaaccacatttctgcattgccagttggctctgccaataggggcactagctggagacttcaaagctggaggcagaaaaaggggttttctccttcctatatgcttcctgagggtttcccgtctgcttgtggttcctgtgagtgttaccccagagaagctccttcatcataactttttttttcccttgtagcagcagctaaatctagttttcagtttttctgacttgcagaatcagcttcagcatgtgtcccttggggacaccagcaatagccagccagtgtctcttctgcagagatttggatcctaataccctggatccctccctgtgaactaagacaacaagcactggccaagcaatgcctcttacagatctgagtttcagttccttggggcttctctactgtttctaatttttaataattttaaccttttctctttgcctcttggctctcagcagttgcaacctttatgatattttagagttctcttttaactttttttagttactgtggttgttagttttatatatcagtttggcttggctgtagtacctagttatttaattaagcactaatcaggtattgttgtgaaggtatgttgcagagctacactaaattgactttaagtaaaggagatggccctcaatagggtgggcgggcctcattcaatcagttgaatgacctgaagagcaaaaactgaggtttcctggaggaagaagaaattctcaagactgcaaattagctcttgcgtgacagtttccagcctgccaatctgccctacaggtttcaggcttgctagcccccatggttgtatcagttaatttcttgaaataaatctttttatatatagtaagagatgctggttctgtttttctgaagatccctggctgatatagttatctagttagtatctttgtacctatttgcatatatttaaaaaactgttgtggtttccatctcctgattgaactctaactgattcaagcaatgcacaattggaagttttcaataaagactcctatactaagtgtaagtttgaacggcaattatgagcacagattgcagccagtaaatattaatagaacattgcttaggcagagaatatgccaaacccaagtatgtagcttagaagagcagcaagagaaaatggttaacacatagagcaggtaaacagcattctgcagaggataatggagggaatcagaatgctttgggcctggcgtggtggctcacacctgtaatcccagcactttaggaggctaaggtgggcagatcacatgaggccaggcattcgagatcagcctaaccaatatggcgaaaccctgtctctactaaaaacacacaaaaaattaaccaggcatagtgacggccccctgtaatcccagctactcgaggggctgaggcatgagaatcacttgaacctgggaggtggaggttgtagtgaatcgagactgtgccactgcactccagcctgggcaacagagtgaaactctgtcacacacacacacacacacacacacacacacacacaattcactttgaacatatgcagagtggaagcacgactactttctatgaatagcaatgtgagtcctactaggacaggactgtgtcaatgcagaagaaaaagcaaatggaaccccttgggtcaaatagaagattagaagttagaaaagaggaaacaaccctggatcacagcagaagttacttacttgagacagttctgtgtcactaatcatctgaaaccttagagacctaaaacaacaacaatcatttattttgctcacaaatatacaatctgggcagggctcagtacagataggtcatttctgttccatataattttagctgaaacagctcaatgaggactgccagatccactttcaagatatttcattcatatggctgaggctggctctctgggagctctgccagagcagtgggctgtgaacctccttcccatgtgagtctatctccaggatgtttgggatcatttatggctgggttccaagaacaaacagcctgagagagaaaatgagaaactgatggagtcttaatgtctggaccaaaaaaacttggttctgctgcattctatcagttaagtggtcacagtacccagattcgagggcaggagatatagatgtcatgtctcagtgggaagaatgtcaaataattttggtaccatgttttaagatggccacagaggaaataattagaacaggcagccaaaattttactcttgagaattcctaataggccaagttaactgctaaataaagtgtatgtagttctctttggattgggtggatttagtcacacaagtccttttaaaatcctgagttaaaaatattcctttttttactattatttatgactcagttaggtcaatcctacctgattatccaccacgattttggagattaacatcagcaaaataggagtagcataatcctatatgaaacgtagtcttggtaagaaaatgacaccaagcaagtcataaccagacatatcttaaaagcaactatataaaagagacatccatgggagaggaagaaagataaaaatgatagcaaatttctcattggaagtaatgcaaataagaagatggcaaagcagtatctttaaagtacagtaagtcctcacttaacattgtagataggttcttgaaaatggcaacttttagcaaaatgatgtacagcaggccctcgaataacattgtttccttcgacattttttcattacaatgttgatgagaaaaaaatgcttttattatacgttgttttgtttaaagtttccaagaacctactgatgacattgaggacctactgtactgaaaacaaaacaaaacaaaacaaaacaaaaaaacctgccagcctaaaattctgtatccagtgaaattatctctgaaaaataaagatgaaataaaggcttttcaggcatataaaagttgaaaaaatgcattgccagcagacctgcactaatgtcctttaggcaggaagaaaatgatatcagatggaattctgaatatatgcaaagaaataaagggcactggaaatggtactacatgcgtaaatgtataagattttaagaatatctttaaaagataattatttttaaaaaataatgtactttggaatttataaaataggtataggtaaaatgtatgaaaataatagcataaaagctgggagtgaagaaacggaagtacactatcataaggctcttataccttacatgaaatatatagtatgatttgaaggcagactgtggtgagttaaaagcatatggtacatatgaaaccctaaagcagccactgccactaatataataaaacaaagttatatacaataagtcaacaaaggagataaaatggaataatgaaaatacttaatgaaatcaaaagaaggcagaaaaaggggcaaaggtatttaaaaaaagatggtacaaatagaaaacaaatagcaagaggatagccccaaacctagccatatcaataatcacattaaatacaaatggcctaaatatgaccattaaaaaggagacataatcagactgaatttttaaagaaaatacgtgagaacaaactatatgagagacatactttaaaaacacaaataggttaacagtgaaagaatgcagaaaatggagaaagatatactatgctaatgaactgtccctcagtgagttaaagaaaccaatgactaaatttttgggcttataagatagcagataagaaaagaaacaacttgctgaaaagctgaaactgaaactgtgcaccaaagagtaagaaaccagtaactaacagaaactcttgagctggcaggatatcagataagaagcaacttgctgaaacgctgaaactcccttggcttctgatatcaagaaaaaaaaactggctgaaatcagttggaaccaagatggcctactggagtttgcacagaatgagcttgctgacatcacagcctaaatttccaccatatgtttcatactaactccccctgatttgcacatgagacctgtgatctagcatgaagagataactgcgcatgcctaaggactttccagacctccctttccttccaccaatcacctactgatctcagaatctaccccctgaacttttcctaaaataaatattgtcttgaagccagcacagggagacagatttgagcttgacactcttattttcttgtgagtcaacttgcaatataaagcttttcttttctcaaaaactcaatgtcattatattggcttctagcacatccagcagcaagacacttttgtgcagtaacactaataatggtcaaaagaaagctggctatctacatatgtctacctatttatctagaggcataaatctcatctatatctctatcacacatatttcagagaggcatattaccagggataaagaaggtcatttcataatgataaagaggtaaatttatcaagaggacataacagtcttaagtgtttatgcacctaataacagagctttaaagtagataaaacttcacagaactacaaggagatatagaaaaatttacaattatggtagaagatttctttttttttttttttaatttgagacaaagtctttctcttttgcccaggctggagtgcaatggtgcaatcttgtctcactgcaacctctgccttctgggttcaagcgattctcctgcctcagcctcctgagtagctaagattgcaggcgtgtgccaccactaccagctaatagtagtatttttagtagagatggggtttcaccatgttggccaggctggtctcaaactcctgacctcaagtgatctgcctgcctcagcctccaaaagtgctgggattgcaggcgtgagccaccacgcccggccaattatggtagaagatttcaatacccatttctcaataatccatagaataaggaggcagagttagcaaggatatagtagacttaaataacactgtcaaccaagttggcctaattaacatatatagaacactctacctaacaatattagaatgttcatcctttttgagtgcaaacagaatctttaccaagacagaccatattctgggccgataaactggaagtagctcaaatgtccatcagaaggagaatgggcaaacaaattgcggcatagccatataatggctactactaagcattagaaagaaattaattggtcatacatgcaacaccatggacaaatctcaagataattatgttcagttgaaaccagacaaaaaagactacatactgtatgattctatttacataatatactagaaaacccaaattagtctatactttcggaaagcagattagtgcttgcctgagcagggttggagtggggatgtgggtgagagggtaggagaaaaggattaaaatagagcaggagaaactgctggggctactgagtatgttcacagtttaattgaggtgatggttttatggatgtctggatatgccaaagcttatcaaattgtacactttcgttacaataaaaagtcagcccatttagaagtttataaagaaaagtgaaaattgtttctctgctccagatcttacttaggtttagagtttgtattttctttctttctttctttcttttttctttttctttctttttttttttttgaggcagagtctagttctgtcgcccagactggagtgcagtggcatgatcttggctcactgcaacctccgcctcccaggttcaagcgattctcctgcctcagcctcctgagtagctgggattacaggcacctgccacagcgcccaggtaatttttgtatttttagtagagatggggtttcactgtgttggccaggctggtctcgaactcctgacctcgtgatctgcctgccttggcctcccaaagtgctgggattacaggcgtgagccaccacacccagcttattttttcttttaagggatgggtcttgctgtgttgcttgggctggcctcaaactcctgggctcaagcaatcctcctgtctcagagtttagcatttcttaacatcatcttaacccacactgttcaatataataacctactagccacaagtggccatccaaatttaaattaattacaattaaaatgtaaaactgggctgggtacagtagctcacgcctgtaatcccagcactttgggaggctgaggcgggcagatcacgaggtcaggagttccagatcagcctggccaatatggtgaaaccccatctctactaaaaatacaaaaattagccgggtgtgttggtgtgtgcctgtagttctagctactcgggaggctgaggcagaagaatcccttgaacctgggaggcggaggttgcagtgagccaagatgtgacactaactctaccctgggtgacagagcaagactccgtctaaaaaaaaaaaaaggaaaactcagtccttagttgcaataggcacattccaagaactcaatagccatttgtggctagaggccaacatattggagagttcagattatagaacatttctgccattagagaaagttcttttggatagctttttcctgggctatgtagagactcagcactattacaagcaacttagatctttcactggccgcttattgagcacttacttttgccagaaactgccaggtcctttatatgaattatctctaattcttgcagggaaagactaagagaagcttgaataattttccaagggtcgcagttactaactggtatacctaacatgtaaacctatgtctatctaaccccaaagcctaagttcttatgtgggtctcatatctcctgtgactgggccatccccctttccttctatacttgtgaaggattcttttcatattcaaccatggagtcttatatttatccctcctaaattttgtcttgttggattaagcttattgctccagattgtcaaaatattttaggatcctcatcctgtcattccatatgctcactcgccttccaagcttcatgtatttactgactttgataaatatggcccccctaaacttcatctgagtgatcgataaaaatcattgctaagacaagggaaaggatgaaggcctgtggtcggctatcagaaaccctcccgcttgaggttgacatcagtttaccagtctgtaaccttcaagataccagcataccaacccatttctactcttatctccagattctgagggatatgttctatatttggagcctaaagacctactagcaccatctagaatcatatgctggttataaatgacttccagatgttagccaaacaatgtttgcttctaaccaaacataagggccagaaagatcaagatattggcaccagtgttgatgcttgtcatttccacttagccctccttgctgccctcacctctaaagtggttgtttgataatttgttgctaaaagcaaaccatcccacaacagcggcttcaaataatagcaatcatttatttgctgatgaatttgaaatgtggacatggctgggtgagaacagtgggcctctactttactgtggcattggctgagcttaaagaacagctgtggactggcacaatgaggttcctctagcacaactctgagagtcttgtcagcttttctcatggcttcctgccgcctcctccccaccccgctttcaaacactgcccatattgaccaacatgtgtttcccacaatgtgccatcattgaccatctctagggctccatccagtgtgcctgtccttttccatgaatcctcaaagactcagccaaggtgtcacctctacctaggagccttccctgatatcccctgcccccacacaacttggtttgcattactgtctctctactgtgttccacagcatgctttatttccccttttcaaagcacttataccactgtaatggattatcctctttgtttgcctgtctttcccatgagatcctcagctcttcaggggatgaaattgttgtcattttgcattcccagaccatagcatagtgtgtaagatacagtgggtgctcaatctgttgaatcaatgagtgatatgatgatgacaggttctggaagttaaaatgatactatcgaaataccagattagcaacaggacctggcacctgtaaagagccacagtgaagcaggttctactggacataagattaaatgagttcaagtccataaagcatttggagcactgtctcacaaatagtaggcgccatataagcatttgttgttgctattatcattgttacgatgcttgcggctttcaggtgtagagctgtctttgccaaaggttctttttgctctcccattagggtttttctttaacagggaccttggacaacgttggcacttcctcctcctctgggagttccctgggaggaatcctctggaagagaaagtgtgttcaagactaacagagtctgcatgtgtttttctcttggcaaaggctcagtccctgctctagcaccattagcttcgctcctattgtcttccactgcagcaggtggatgcagggatcaccacctgccaggtgcttctaagcttccccaggcacagcagggctaagaaaagggagaagtgagttcagggacagagtgctctggtatgccgccaccctgggatcaacagctccctttcccccaggatgtcctttgtgggaaggctggaaggaaagccgcccactgaaatgaaaactcctcacactttgggaaagggtttggtctgcaccttaatttggaagaggtgtccaggttcttcaagttcccacaggccttgttcttgccctgcctttctggggtagtcagaagctgacaagtcccagagttctctcgtcatgtccgtgccccaccgtgcctggaatctggaggaacttgagcacggcagttttagcctgaactgtgattaatatttggtgctgggaaaactgggggttctgggctaagcctgaaattattctgggcaagggggaaaggggaatttccaagatgccctcgagagaatgagcggggcagggtcctgagtaagaggcttgcatgaagggggaaatggagaagggcgatagggaaacacccctgggtagaagggctaagaagcaagataagtgggaatggcagctgcagggcccacgaagagccatagctatgggcaaagttggcacaagaatcctggaggagaatgctggaggctggtgggtgatatggaggaaagaatggggttgagatgttctacttgtgctcctcttccatgtctcaggttaaacctcacttccttagagaggcctttcctgatcctcataaccctcattccattccggagtcagtctccatgggtctggatctcagctcctcacttacaagctcgacaaccttgtccaagtgtttaaactcttttaacttcagttttatcaatctgtgttatgtggctaaagatagtaccttctcacaaggttgtaaggattaaataaattaatatattgaaaatgcttagcacagagcccaggtcttgactggtaagagtgatcatgacatctgtttaatggcctgtctctcctactactgtgaggtctgtggggccgggaatatgctgtccactttggtgtcccccaacgcttcggtgtcccccaaacctagtgcagggcctggcttgttgtagggtcccagctgaatgaatgtgtaagtgaccagggtgggctcaggtggttgcagccttgtgggggttagggtctagggttatatttcactgcatggatcctttctttttctttcttttttttttgtttgaaatgaagtctcactctgttgcctgggctggagtatagtggtgtgatctcggctcactgcagcctccacctcctaggttccagtgattttcctgtctcagcctcctgagtagctgggactaaaggcatgtgccaccatgcctggctaatttttgtatttgtagtagagacggggtttctccatgttggccaggctggtctcaaaaccctgacctcaagtgatccactagcctcggcatcccaaagtgctgggaggcatatgccaccgcacctggcctaaacattttttttctaggtgatccaagttagaaaagacaccaagatggctgggtgtggtggctcactcctgtaatcccagcactttgggaggctgaggtgggcggatcacgaggtcaggagattgagaccatcctggcaaacatggtgaaaccccttctctactaaaaatacaaaaaaaattagctgggcgtggtggcgtgcgcctgcagtcccagctactcgggttgctgaggcaggagaaaggtgtgaacccgggaggtggagattgcagtgagccgagatcatgccactgcactctaacctggtgacagcgagactccgtctaaaaaaaaaaaaagacaccaagacaccaagattattcctggatagaataactgtggatgaccatttttctttccttctagttttttattccattatctattttatttttgtgttctctataatttttccataccaaagcaaggattacttttctaatggctgagaaaagaaaatgttattaaacaaacataacactctccgttgtctggaggtgaggagccatcactgaaggataagaatgggtaagaaatgcagggaataaacagtgtgtgatgggaaggcttctcagccttccaaggcctgttggaggtttcacaggatgttcctgccaagggaattctcaaagctcaaagccatgggggtggaggccctgcttccctccgtcttaagaaggatgtgacttgggcaagtttcagttttagcaggatcgccgtgtcttcagagggaaagaatgttctcaaccttgaatcttttgccaagaaatggtcctgagtgttttgaggggcaaaactgctgctcctgctgctcactcaagcactgttacttgatatcagcggattatttctctccagaggcttgggtcccctggatggagggcaaccctagctgttgccccagggggaaggcagggaggaggctcggacggagttaagaagcctaggtaggctgagttctagctctagctggctgcatgatccttcaatcattgagccttagccttcccatctaaagaaaggaggacatcttccctattgatatggaagatcttccctgttgacatggaattccgagtgtgaagtaatgctatatgtgaaaaatgccctggagatcataaagtgatggacagatgctgtttgtgaatgagaagagtattggtggaatagaggaaaacatagactctcttcagtgagttaagtttatgtttcttgcatctgccgattcaaaaacatgtatggcatttcctccttcttgtaggagcttcctgtatgttatactgtctgttcctcatttgccacatgttatagatgagaaaactggggctaagggaagatagactgacctggttttcccaagatcacagagctagtaagagtaggggaggaattatcacccccatttctccggatgaggaaactgaggcacagagagattaattcatttgtctgaagttatagagccagcaagtgtgaaagttatacctgagtctaaaagaaaaaaatcttttttttgagatggagttttgttcttgttgcccaggctggagtgcaatggcacgatctcggctcactgcaacctctgcctcctgggttcaagcgattatcctgccttagcctcctgggattacaggcgcccatcaccacaccctgctaattttctgtatttttagtagagatggggtttcactgtgttggccaggctgttctcgaactcctgacctcaggcaatctgtccacctcggcctcccaaagtgctgggattataggcatgagccactgcgccaggccccctgaatccaaatcttttaatgttactaatttagggttcatggactcttgaggggttctcagaaagacatcagaaggaaagtttgcatatgtgtacatttttgtggggagagggattccatatattgaatcaacttctcaaatgaatcagaaatcttggacctgtagttggtgcataagtaactctttctgtatttaaacattgatcatactacaagaaaagctttagtgatggcaagttactctggcacttaaaatgtgcttaattgttactgtgcttcaaggctgtgagtcaaaatgattgaattgcctttgatgcagctggccaacttgaatttttctttctcctggcttaataactcttcaatatctataagatgtcaagatcaaaatttttccttctgataccacattttgtttaatcttcaacttaggtgcaaaccctagacgaaaaaagactgtaattcaactcttcagtagccaggattgcctgtctccaaccccttctgaatctagttatgttggatactgggagagaagcatgtagactctttgggcctgacctttctgatttttctctggaagggcttcactgaaggggcacagaagaataatgtttctacagcatagatccaggggctcctccccaccaggaacccagcttagcaggcaggctgttcatgtggaactcgccaaaaccccgtgcaggtggatgtgcggaaacaccaaagaactgcacgattgtccctgcctttggaaggtctcattccctgtcattccttcattcagtcaacaaacttggaggacccagtatgtgctacattttgaggataaagtgatgaacaacacagacaagatccctgcccttgtggagtctatattcaaaccagagcttgaccttcaaactgagagaccaacttaaaaatggggccatctggccactaactgttatacaccctctgcttgggacacacggtctcagccctcctccaccttcaagtctgataggagagagatttcagagtggcccaaacaatctaaagtaaaagtgaacagagttcaaaataagtcctcaagggctgaggggagaccaaggggaagataatgcggtgagggcactgagagagggattcctagaggaattgtaccttgctttgaattttagccctaagctgcaaatcctagctaacttctaagtagatgctgacagctggcttctatttggtctgccatattgaatggctttgtccccaggacatggtggagatttagacaacccagggcagaaaatcctctaggaaaggaagtctgaactacaccgctggctttctgaaaggacaggatttgaggagctgggatggtagtaggggagagggcagctgggtggggtttcttccaggaaacaatgtggatgcaagatgcagtcctcgtccctggcctgcccttaccgctttagtatttcagatgagtcagctctcactctgccacctgctttctgtaactctgcagcaggccagcagcctccagtccaccctctcctcctcccagggctctggggtgaagccctccccaggaactccctggctcccagtacccatgggagaagctcttttcaactgacatgatttattttaacaataagaggaaaaaaccacatccgatttccacagaattagagttcctcctgacacgcctggacttgccagttgggaaggacactctcaagccatcctctatgccatttgccgttctgctgttcctttgcttggagggaagagatgcctgtttctatagggaggaagtttgaagtgagaagagaggacaaagattctgtgaatggaaagagcactggactgagagttcagggatgtggcctccggtcccagctccaccactactcagttgtctgacgaaggaaacagaaagttgtgatacaatgtgggtgacacattgcctagaaagaagtgccgttgtgatacgcttatgttggtgggatgggggaaagaaataacaggtttgtatggagtgttatgaaagaattaaatcttaaccttccattggggtaagctgatggaaacaaccatagcaaaggacagactgaatatttttttattctctttatagaaaataacagtaaaaaaaagtattgacataggagaaggaaacaaaaagttgtcaggagttaatgaatagaaatattatttttttctggattttatggtgtttgtgttatttgttagcttttatgaatttgtaatttgttgtaatttctttctaaataagtatttacttttgtctctaattttgtccatctatttttgaattcaattttcaaattcaaaacgcttctctcggccgggcacggtggctcacgcctgtaatcccagcactttgggaggtcgaggagggcggatcacgaggtcaggagatcgagaccatcctggctaacacagtgaaaccccgtctctactaaaaatacaaaaaattagccaggcgaggtggtgggcgcctgtagtcccagctactcgggaggctgaggcaggagaatggcatgaaccccggggggcggagcctgcagtgagccgagatcgtgccactgcactccagcctgggtgacagcgagactccgtctcaaaaaacaaaacaaaacaaaacaaaaaaaacaaaaagaacaaaatgcttctctctgggcctcagctgttccctcatctgtaaatgagaagggtgggccagatgctctttcatgtctggtgtaatgaagccctggagtgggctgcctatgactgcacgcagctgtaccacaccccacctgggtgtctttgggtgaagtacttggtagctccaagtctcatcttccttatccaaaatgatggacacaaaaatagtattgacctcatggaataggtgtgaagatgaaaacagacaatgcatatggatgcttcacacagaccctggggtggcaaatgtgctcagtacttgttagttattagtgtgagtctactcttttagtctatgaattttgttagaggaactcctgcttaccaggcctctggtttaataaaacatgactggagtgacacatttctaagctcaccaccacttataattacagaagattgatggctatataggacatctcccaccaagcctgcagaatgtccagatgtcccaagtacagcccactttactcagagataacgtcaatgagcagactcaagttgaaggattaatggtcactagagcaccaacagcccctacctttagtgagcacatctgcacattccaagtttaatcatagctccttatagtttcttataagcagagatgttcctaaaggacaggggttcctcctcctgctttctgggcatgccctactctctaatggagtagtttccaataaatttgcttctttgtctgtgctccaattctttcctgtgtgagatctaagaacccactcttggggtctagattgggatcctcttttctggcaacatcttgagtatgtgaccatgagaaatgttagaaattggagtgaaaggtacgtaaacatttgaacccaataccattctctggttctcccagaggcacagtaaaaaaaagtattgacatagaagaaggaaacaaaaagttgtcaggagttaaagaataaagatttttttttctggattttgtggtgtttgtggtatttgttagcttttatgatttgtaatttgttgtaatttctctttctaaataaacgtttacttttgtctctaattttgtatttctatttttgaattcaatttattttcccgcagacagggtctcactctgttgcccaggctggagtgcaatggtgaaattatagcagactgcagtcttcaactcctgacctcaagcaattgtcctgcctcctcaacttcctgactacaggtgtgcatgaggactacaggcaggcatgtgccaacacatgcagctttttttttttttttttttcagagatgtggtctcgctttgttgcctacactggtctcaaactcttggcctcaagggatcctcccacctcggcttcccaaagtgcagagattacaggtgtgagccactgtgcccagcctgaattcaatttcttaaaaggactctccccacccaattgtatgagctatgcatggccagatttagcaaatacaaatacaagacacccagttaacttggaatttcaggtagataaacactgagatgttttcattgaaattcaaagttaaatatgcatcttgtatccagcgggaatataaaaaaggaaagtagtggtcaactcaaccagggttgaagtggggaggaggaggggagtggggagaggaaaggaagaggggagaagtttcacaaaggaagtcacactggagctaggttttgaacgttaggttggtgtttacaaggtaggtgaggcagcggggctttctaggtgagatgagcctgtgaggtgtgggagatctgcaagagagatgaggcggaaaatgtaggcgaagtccaggctgtgatgggtctggatgctgtggggagcagatttcctgctactgggaggccccagggcgttatgctgggagttttagactggagagttccaagactgggtttgcattttaaaaagtccacctacctagggaagagtggattgttcaggagaggaatggggaggcatcagttgggctctttccattactatccctccatcccatcaccactggggctctttcataacatttgaaccacagagcccattgacataagatgtgtcacccagggtctgaggctttgaacagactttgaccaagatccctgtgggcaaaaaaggaggaggagaaggaagtacaggctgaagtggcataggtgcccaatgtggatttgtgcttccctccccaggagcacaggtgtggccagtttggatttccttaagtcctcagcttcctgggtaatgacaagtcagaacagcatggcttgggagagttatgtcacctcctctgctgaatgggcttgaggttcctcacaagtctaggttcctttccactctacctaatcctagagtgaaagggcagcatggggttagaaagggcgctgagccagaggtaaggagatagaggtttgagagcagttgtgccacttccttgcggtgccatggagggctggttcacttctctatttcttcatcactgtaatgtgaacattgaactgagttatctctgttatattttctgactctcatttccaaatatcacaataaaggagagccaaccccactgaaaatgaggaataaaagagagagaaaagataaaaaaacaaaaacaaaacaaaggagaaacttctttaggtttaaatttcccagttctttttctcacctttttttttgttttattttcaaagctatacagaagttcacacatatcattatgatctagatatatttaccaagacatttaaacatttatgtattctgttttaaaatccctattagcttcccaaataaaatacccatccatcattatcagttttatatatatatatatatttgagatggagtcttgctctgttgcccaggctggagtgcagtggtgcggtctcggctcactgcaagctctgcctcccgggttcatgccattctcccgcctctgcctgccgagtagctggaattacaggtactgccaccacgccaggctaattttttgtatttttagtagagacggggtttcaccacattggctaggatggtctcgatctcctgacctcgtgatccgcccgccttggcctcccaaagtgctgggattacaggcgtgagccaccgctcctggcctacgtttctttttttacaaattcgttctcagtcatacttcttcgtgttttatagtcctcataatgataggttctttctcaaatctaaccaaaattactcatatagatctaatacatttcatctaaatcctgcaatgggccacacattgctcaagtccatggagcctcattcccacagaaggcaataggcatggtaccctctggaattatgcaatttttgtatgcgctcaagactcagtacttaggaatggccaggatccactcttttaagggaaggaaattgccctggcatcattatgaaaaattcatgaggttggagtgcatgttaggcggggataaggaattggaagacatgagagagttgtgtccagaacatgtcaaactcaaagcattctccattctggctcgccaatcttccctcacattctttctgcttccctactcaacaagtggaaaattgagctctgatatctcaatggtgggtccattggtcccagaagtcctaattctaaggcagatgcaaccttgtgtctggagaccagattcataattgaattgcaatcctgggaaagatgccattctatctcaatctatattcttatttttgatattaggggtcaggcagcaaggcttaagatgaagagaacttatttcttattgttcccccttcttcctgatttaggagctctaaagggaattataaaattgataataaatgtcattttcaagttgcttattatgcgccaggtactgtgctgaggaattatgtgtaatcacttcatcttcatgctgcgcctacatggtgaacgtgcagtaggcatgatgtgtaccattttacagatgagtaaacaggcactgagattaagtggcttgccttcagtctgacagccatagaaagcagagccagtcaacccagcttccagtaccagcgattatggtacaccacatgctggaagaggagctataaacacatcacttatttcccttcccctgcaagcttcctgatatgacatatctgccctgaaatgaaagctaggtcagaacatatagcctgagcacaaggggtgaatgtggggtgagactcagcatggacagtgttgcaaatccccttacatgtgcagctgggctctgagctgctattctcacatgtgcagagggactccgagccaggcagctcaggccctgctgggaaaacagcacccacctccctccatcccacccctctgggggaaacaagggtgggagtaggggagattcccgaggtcaagagtagctctttgcaccctctccaaaggagcagaaagatgtccattagctcctaacaaaggtgtcttctccttttccaggtgcctggcacacaggatagaaatacataatatttattaaggagtacttactatgacacaggtcctttagctcattcaaatcctcacagttttattttacctattttatggagcttcagaaaggctttaagtagcttttccagtgtctatagacctaatgcatttcatccagactctgcaatagggccacatattgctcaactccatggaacctcattcccatagaaggcaataggcatggtaacctttctgagcaaggcagagagggtacctgcctggccataccctcgtcttatttccttaattgttttctttcttctttaagatatagctgattaatcattattatgaaatgcctctttcttctgggtcttgacatgcagcttctaggaaaaatgataaactccccatctccatgcaaatgagattttttttgcaattctatgttcatacagaaaaatccaagttaggtcactttcctgagagctgtggcatgctaccaagaagagaagggagataaggaagaagagaagagagtgaaccagggtttaaatccagaactacgttgtgaaccactatagtctaccacttccctcaacacttaccattttattatgtccaagatgctggaccacaagacatcaagtccctggggtttctttcccttgcacctgtcccgtaaaaggccctgatctttcctgtcccttttccttctctgccggtgccctgtggccctctctgtctcccaaatctggctgcaggaacagggtttgtaccagcccagtggggtctcataattgcacctcatcccaaggtcacttcatttggttaaaaataagctccatttattctgggagtctgtgtttggggatgtcaaaagacaaaattacaacacatttagtttaaagatcttaattggcttttatttgcaattctagaatcaggcaacatcctattttataaaaatagaatgagtggtcccatgagctgacagaggagagtggttttgtgggcagacaactgctagaggaagcagaaacagagaacaaaaagcaaactggtcatttaaaagttactttccttgtaaaggttagagcagaggagacttccttatacgctggctaaaactggcttgtttcaggatttggctattatctttctctctcctgatttctcagaaggttagataaacagtttagtttcagcttggtggtgtggaacttcattcagcatgagcgactccatttaggtttggcctattggcctagtgcagtaactcagtccaaaccaattaccccctggaaattttatttaatgggaagaaactgtttataccctatcttttcattgccccaaacctgatccctagagaacttcttggtaaagagtttatgtaaaaaggtaatttagttagagagtcttctagcccaagaataaggatttcaggtcctggctctgccactggctgatcttaaacctctcttctttccagtctcattttctctctctctgcattaatcaagaatgagagaaccctccaggggacaagatgaaggggaaatagatgatgtgcaaagaaatccttgctttatgaggggaaaaagtgttcctcatgaagttcaacaaaatgatgcaggtaaagcagttagctagcacctggcacatggcagacactcatagctgcctaaggcattggagaactggatcgtgctgcagccagaggcacctgcagagcctcatgggctggctgctgcagggtgtggctgattgagagtgcttttgtgagttggcctgcagggtacacttggtaacgtgccacagctctcaggaaagtgacctaagttggatttttctgcatggacatagaattgcaaaaaattctcatttgcatggagatggggagtttatttttcctagaagctgcatgtcaagacccagaagaaagaggcatttcataataatgattaatcagctatatcttaaagaagaaagaaaacaattaaggaaatacaatactaagaaaacaaggggaaaaaacaatctccccaaggtggatccacccagcaaaccttgacagcatttcctcttatccacctgaataaaaatgaccagccctttccaaatggcagagagcactgagaggagacacaaggagcagcccgcaagcaccaagtgagaggtgaggctcacgctgtccgtcatcaggggctcctatgcaccgccatcctagccctcctccttcactgccgcagggaggtgacctgttaccattgtgtatggctatgatgttccagatgctgggcatttggtagaatgggaaggggtactctatagaaaaggtgaattttctagtatcttattttcaacgagaagagatagagagtgggaaagaaggagtgaaggaaggaaaggtcaaggatttaatgtctttactattgcttttttgttccaagaactgtgttgggcactttataatgtgttatcattgtttaatcctttgcaatgtgaaatatctttttaaatgtaaggagcatcactggttcagaaatgggttcctgtctgtctggtgtcaggggagctactgggatcccaggctatgatgtcagagggaaacaatgttgtaagtggggtggagtagcagtaaagacagccagctcagggactggcccgccttctctcaaaccctggcttgggcaggttacttcatttttttggtaaaatgggaacagaaacagagcctacttcatagggtggttgtgagcattaaatgagaaaattacgtaaaattcttgggacagtgcccaatgcacatggcacgcaggataaatgttacttactactaatatctgaattagccaagatgtctggaattgcctcaccaagctaagggagacatctttctcctccacaaaatgcgcaagtctcctggcatgggatgagcaggcaatatctgcctgcttctgagagttaccttgtcagaagaaaaactgcactctctttcttggctttctagaagcaccccagtagcgttctgaggagacagagctctgggggactctctacaaacttccctggcaatggggcccatccttgtttagccagaaagagaggttgataaaagaggaaaggagctctttggcttaatgcctgccacgtggtaaggtcttgacatacacctgtctattccctgggaatgatgcccagttaaggagagacaggcaaaaatggtttctaaacaggatttgctgtttctggctttccagaggagctgggaatcctgaggaaggcatggggagtgggggcagctggggttcacactcacacgtgtgagttacagcagctttaactatagctctacagtcctcgcagctggctccctgtgtcttatgccctcctctcctccacggccacacacgatacacttaccttggcacacacagctgtaaatgggagatctcagtgggcaccatgcaaagtgcatagcagagggctgctctcgtcacatgtgttgtcataagacatgcgttaaggctaagctctatttataagcttgtgaaatgtgggtgaaaacagagataaccccataagctgtaccattatattttacgcacttttctctgtgcgcattatgtggcacaatacaaagtggttaaatgaagaggcagcaagaaagacagaggcaagaagggtaagagaatgagaagcggtggcaaacctctcagggtctggccctggctatgaagcagctagctgcaaacatgcccctcataccctttggctcagcaggtgaccgacgggaagttgccaagctgccctctacctttggcttcttcccctagctccttattgtggctaattagttcttgaagatgccttgtgcctccctttcccatctctccagaaggtgaaatctccacagctggcttcaaacaaatgattttaagcagatacactcttgaggtttataataaaagggtgttacttatttcaggggcaaacatcaaaaaccaagtgtgtttttatggtttttcacatctgttgccgaattcctagggcatcttaccaaccctgcttttcctatttaatttattaaaaacaatgcttttcacccctgttgacaaagtaggctgtgttgagtcataggagagtgatatgcatacaagtatgcttcctgggacttaagagagtggtgtatcgtgttttctggggtggaggtgggggcatggggtgagggtggggaagaactcatatccagttgactcaagaaaaccagaggagatacatacccctgtaactcctcaaggctgaagtgtttagtgttgttttcttgtattcctcccggcttgccttcgaggctggaaaggagcgtcaatcaggggtcttctttttcattgccctccactcttggctggacagctgacttcctctcctttctgcaggcatgaagttacagtgtgtttccctttggctcctgggtacaatactgatattgtgctcagtagacaaccacggtctcaggagatgtctgatttccacagacatgcaccatatagaagagagtttccaagaaatcaaaagagccatcgtgagtatgggttggtgtaaaggtgtggatgacggagtatccctccccttacatcttagcttgaaaatgagttccttctcattgccttttgcatctcagaagaacataggataccgattgcttatgtctgttcttatgtttccctccacagcaagctaaggacaccttcccaaatgtcactatcctgtccacattggagactctgcagatcattaaggtattggcctgtgtctgctttttccagtatttttatcttcatgtctaaatggctctgggctgagaaagaaatccctaccttgtccccttctctttcctaatctccaatgtactctaaatgcaccaggcttctttgtcagatgatgtgttagggcacgctagtgtcccagggatatgtaacccctgggaggaattaaagaagtgctgcttcctagagagtgattgggggtgccaggtgctcagaggggacaggatttctgtggcttgggggtaattttggaaggtcccatggaggtagctaagaaaacaaacggtgacttaacccgaggaggttgtagatcagtgaataagagggaggaaggaatttgggcaggataagataatgggtgtaagatcagtgaaggtcggacatagaggtgaccaggtttgtgacccaaaggacatataagtgagtggtgggagatgaagtgaaaaaataccctggagtcattttataaaggtccctggagccaggctgagcctcaggcttataatacagacaataggctgggtgcagtggcttatgcctgtaatttcagcattttgggaggctgaggctggtaggattgcttgagatcggggcttgagaccagccagagcaacatagcatgacctcgtctctacaaaacaaaacaaaacaattatcagggcatagtggcatgcaactctattcccagctacttgggcggctgagatgggaggattgcttgagcctgggaggtcaaagctgcagtgagccatgattgtgtcaatgcactccagcctgggtgccagattgagacacccaaaaagaataaaagaatgtgtgttagggcatgctagtgtcccaaggacttggaatccctgggaggaattaaagaagtgccgcttcctagagagtgattgggagctcccagtgctcagaggggattaggatttctgtggcttaggggtaattttggaaggccccatgggggtataaaagaataaaagaaaataatagcagcaatagagagtcaatgagatttttgagcccaaagttatatgatcataaattgttttagaaagacaatctggtgctgttcttacaatggacaacgtgaggcaggaaagccagtgacaagatctgcccaatcatctagacaggaggtgatgaaagtatgttacaaaatagctggcttaccaggtgatcattcattttacaaaaaggcccatgagagatgcctttaaaagagagctcctccagtcctgggaagtattctagacagatccagttttgggagggattttgtatgacagagtgtaaggtatatttgtattgagttacttttttctcaggtttctctgcatacgtgagagacacacacacacacctcttcataattcttctaagcagtgatttatttgtggtgaagagatgtagccacttactaaataatattctagccaactgtattatagacacagaagatatgacagctagaagggacccaaaagaccatctattccaaaaccatcattttcaaatgaggacagtgagaccttgggagggagcatgactagttagtggcagagttaggaacagacccccaaatatatgcccccatcttcagattctttctcctctcaaggttgggaagtagctcatgtggaataagaaaaggagtcaataaggattcaggttccttcccttcctttcccttcccttcccttcccttcccttcccttcccttcccttcccttcccttcccttcccttcctctctccttcccttcctttctcactcccaccttccttttttctgcagtgttcctttttctagtaccacagtctttgatagtgcagaggggtgtaacattttgcccttctggttaagagaatcagcaacagtgaaggaagagaagggtttttgtgttgccatctaggaaaagctgacactggggccaaggaggctttgcttcttgaatgaagatgggtgtgctgtcccaccgttaaccactccctgcttagactgaacagttaatcttctgcagagtaactggctctcagggcagatggcgggcaaacttctagaaggaaactgtctagccaacttcactgggctgtgcctgggaatttagagactatttctttgggacatctgcactctgcaggctgcagacctacccaaatatgcccatttctgcagctgtcggtctctcttgcaaatctcagcctcattccaatgacctttctggttttaaaaggacagactacaggagagctgagcagtgtggtccagagtaaggtggccagaatgaatgcaatgtgattacagttggaggaatgcatacctagcaggatgactggcatgcaacagcccttgcatgttggcagatgggagacataacagagaggcaacttcagcccctgtagtgtagggaagttcttttcaagaaagctgctcagccatcagtccttttaaaaaggaggcaactggttcctggaaagatttcagtggaagttagtgatgacacgctagggatactgcagagagaattagcctatgatggattctgggccccatccttagtaaatgtatttctcggccatacagaaaaaggggagaactggaatctcttctcactatttttgtcataagtagctttgatgggaataagagaggatgaacactctgagaccattacgaatttttccaaaatgacttttagttctctcatgtgtcgctgcccctactcaaatggactgccctggtctccaacataatgagagaagaggcctctagtgtttccctaatttgtgtttgtagcccttagatgtgtgctgcgtgaccaagaacctcctggcgttctacgtggacagggtgttcaaggatcatcaggagccaaaccccaaaatcttgagaaaaatcagcagcattgccaactctttcctctacatgcagaaaactctgcggcaatgtgtgagtcactgggtcagaattccagcatctgctccctgtctgcccaaggagaggccaggaagtgctggcccccatcggcctcctgatatggtgcttggagtcaaaggaaattctctgcgcacgtccacagggagaactgtggagaacctctcccagtggccactgcttccccagggctccctgcctgctgacaactcctcagatggtctcctcctagataaccctcctggggtgaccaacttatgtcaacatattccttagtaagaggcatggcaaggactccagttctactgtaagcatacccctggtttctttatttctggccctttggtgtctttacatcaataaacctctgggtagttccttggtatggcctatccctaaaggttacttagaaattcattgcgatctatttaaatccaacatcagaaacaaaaccaacacaaaccaacaaaaacttagaccaggagagaacctgggctctagccccattcctgctaatgatttcctgtgagactttgtggcaagtgacttcacctctctgtgcctcggattctaaaattgttagaagagttgatggcccctgtcctacttgcattaatatgataatggactcaaataaattcacctaaccagttgtttaattaacaattcgttaaaattaattatctaattaataattaacatttaacaaatgtttgttgagtgcctaccctgtgggatgcagcactcagagtggtgataagacagatatggtgcctgctttcctagtgctgacagtctgatgtgttctaaatgcagaaaaaacaaaaggcgtgggcagatgcaggtgactctacagacaagctctattcttccgtggctgctcccacctgagtttactcatctgactctcactgtgggagggaggagaaatgtcacttctcatgtggggaggcaggagtaagagagggccagagtggaaatgtcctctgataggagcttcctccactttatcacagcaggaacagaggcagtgtcactgcaggcaggaagccaccaatgccaccagagtcatccatgacaactatgatcaggtaagatctgggaagaggttggggaagatggaagatgagaggtagatcaggagggtgccaggccttcagcctcctctccacttaaattcatgcattcactctataagcagccattgtgggcaggcctcaattctctgtgtctgtaaagagagttttgattttacctcatttgctaatctcctgggctccccatctccatcattcctccaccattttctcataccctcatatatcaagcctgacctgtatgatttggggaaagcacccactgcttaagatgggatgacacagagggagcaaagatcccccatgaaatgtgagctgttacgcctgaaacgtgttacctgcacgccgtcactgcgatcactacctgcccccccatattgtgtgtagtgatgaagacatggtacttctcatgttgatgttggtgtaaaatgcacatctcacgtggaggtagaggaagaagcagtgtttctcatgagcatcagttcaagatcttgttaaaatgcagattctggctcagcagggctgggatgagcctgagtttctgcatttagatcacactgtcaaatgataccaatgctttgaagagcaagagttagggagtctgttatgggctctgcttctttgtggagagactctgtaagataatgttatagaaatagctaagagttacatggttcttactataagccaggtattgctctaggcacacaacaagtattaacacacattcgtccttcccaacaatgctatgagtcattatctgcattggatacattaagaaactgaggctcgagcaggtaaagtaactaaactaagttcacactgcaactgcacggcagaggtaggattcaattccacgctggctggctctacaggacgcgctaaaagcatgaactcagtctgctgaggaaggaggtggaataaggcaggagacttgggtttcatttccagctctgttactaactggctgtgtgacattgggtaggacacttgctctaggggctttagtgctctaatatgtcaaatgaggacaacatgctctccctacccactgtccagcacctcagggacaaagatgttctgggataacagaagcactaaagcaagctggtgtggagaagaaaatcagcggaactggccagtaaggcagatttttttttcctgtgaaaaacagaggaaaaaaaaacctgagggaaaagaatgaagaattttaaagttctgtttataaggagctgacataatttaactacttgtttgtggggaaaaaaattggttgcctgcgaggaaaataatattgagtctgtatgttatgcaaatatatttcgtgacaaaaaaacaaaaacagaaacaaaaccttgtgggaaccagcatatgaagaaagtgacttgaaaaccattacacagtctagaaaggtgggttcttacattgatctctgatttcagctggaggtccacgctgctgccattaaatccctgggagagctcgacgtctttctagcctggattaataagaatcatgaagtaatgttctcagcttgatgacaaggaacctgtatagtgatccagggatgaacaccccctgtgcggtttactgtgggagacagcccaccttgaaggggaaggagatggggaaggccccttgcagctgaaagtcccactggctggcctcaggctgtcttattccgcttgaaaatagccaaaaagtctactgtggtatttgtaataaactctatctgctgaaagggcctgcaggccatcctgggagtaaagggctgccttcccatctaatttattgtaaagtcatatagtccatgtctgtgatgtgagccaagtgatatcctgtagtacacattgtactgagtggtttttctgaataaattccatattttacctatgaatggaaggatcttttcattcagggagagtcagtcaagactgaggacagggtgtttctgacagagggatggttgtcatggtgacaaagctgaacaagcacagacacaagtaagtagagaggccactgggtagagaggctgaaaagggtaccaacatctagatggacactgcatagatgattcagagcacaaatgtgtatctttcagatttcatatcacatgctttaatggaaagaacaagacctctgaagtccaattgatctggttccaatcctatgtgactttgaacaaagcacttaacgtttctaagactcagtgtcctctgttgtaaagtggagatattaacaccagtcctgtagtgttgctgtgagcatcgagtaaggaaaaggtctctcatgacctcagcagggtgggagacagcacggtgcaatataaagactgccgactcaggggccaccttctggttctaaggcatctcctgccatgaatttcccagggcaggtcagtacatttctttggtccttagttgttagtattgtggatactgacccttctgtactacctgctccatataattatttatttatttatggagacagggtctcactttgtcacccaggctggagcacagtggcatggtcatagctcactgtagtctcaaactcctagctcaatcaatcctccctcctcggcctcccaaagttctggcattacagacttaagccaccacacctgcctctataatcatttaaaagctggagtcattatgagggctttgacaaccctgatatctgcacacacacccctcctggctgttttccctaactgtgtccctgctccttccccaggctcactgtgacccagccatagttgtttgctctgtgtttcgcaaacacaccaggcatgttctcaccatacagtgtatgcactttgtgtacatgcacactcataaactgaggtagggttaaaaaataaaacaaaccctccacacattatgcgttaatgggattcatacgctattagggagcagggttgtttgctgaggacctaacttttccaaagtgaccttggatgggcacccaccctgagcaggctgggtgatggcagttatagcatttctgatcttttatcactgccctgggatgtgcttcccctggacacctgcatggcttgcacctccacgtctttcagaccttcactccaaaggtctcgtattggaggataaccccccatttccaccttcagcacactttgtacccctttcctgtttatctagcatcctattttgtttattagctgctcctccacatgaatgtaagcttcatgagtgtagggatggtttagtttgttcactgcctggcacttagtaggtgttaaattcacaattcacctagattatttattcaagaaatgtgaataaccacaaacatgtatatagtgcttcctatatgccagccgatagtctaagaaatacacttcttgtaatataatataatataaatacatatatatatatttcatttaattctcacaacaatcctattgtaggtttttagaatgaaataaaatgaaaaaggccacctcattgattgttagcagtatggataattaaaccctaagaaggaaactaggcacagagagcttaagtaacttaccctaggccacatatcgcataagtagaagagctgagcttccaatccaggcagccacattccagaatgaactataatgtccacaataatgtacatatgttgagttcatcatgtgccaggcaccaaggtgagaacttaacttatggctcctcctttactcctcacgatagttctctaaggtacgattataattataatgtgaataactctgcactttgggaggctgaggtgggtggatcactaggtcaggagttcgagaccagccaggtcaacacggtgaaactccgtctctactaaaaatagaaaaaatagccaggcatggtggcgggcacctataatcccagctactggggaggctgaggcaagagaattgcttgaactcgggtggcagaggttgcagtgagctgagattgcttcattgcactccagcctgggtgacagagctagactctgtctcaaaaaaaaaaaaaaattgtctggagattagtgaggtttgacaatacacctaaggccatgtttctagttgtacaacagagattcaaactccgggtgtcctactccaaagcctgagccctccatcatgatggtttgtggcttgtgcatcttgctcatgtgacaagaagcccacaagagaaggtgatttactggcataatgacctgcacctgtaggaaatattgttattatcaatggtagtagaagtactagtaggagaggaggaggagcaggaggaagataattgaagaagagctcatcctttctgaaatggctagtatcttgcttaaaactctcctaggtctcttgtttgcttcctttccccgtctacttttcctttctcttttttcagacttgaagaatatgtcccaatgctttttgagttcgcagtagttctggcatagtggggtgtgtgtgtgtgtgtgtgcgtgtgtgtttgtgtgtgtttcttcacagagctggtgcttaagaaatacatgctaagaagccaagagtaacattatctcccaaaccatgctgagtcctctgtcagcccctagtaggtacccttgaaaaatctggagctcacctccactgctaaggtgcaaggggagggaatccatgtcacgcaccagggccatgacaggtactttacacataggacctcattcaagcctcagaggaagccaagggggttggagttcttatcctcacacggtcagtgaaggcatctcaggctcagggaggtgggggagcttgcccaagtccacaaagctttgggatggcagatccagaaaatgaatccaggccccatcttcctggctttggtgccctctccttttgctgctaggggagttccttttatcctggacaagactgtataacctagggcccaggttactatgttgaatgccagcaatgaagataactaaacccagatgcaccaaaaggggcttggactaactagccacaagcttctgaagttacacatgaaattatggacatacacagagcaaaggagcagaggccaacttctgagtatgtcacgcaatgttcccggcccagctgaggcctgggctcctcctggggatgctctatcctccttccatcttccagagcaaattgttaatagccacacatgttcatactgctgaaacttcatactgctgaaaaaggcactgaagaggtaggaaaaacagtcttgaatcgctgatgccaccctgtccccaatcccccatcagtggcagtgtggtgcagagagcagttttgtgttctggggagagggagagcgcagcaattgtgaggcattgaaatcagtactgtccttgttacaggagaaagcaaaactggaacacattcacctgatggccacccatggagggagatttaaaccagccctacccagaggggagtcactgaccccaacagtcagaacttgagtttctgcaagccttaccactgtgggctaaagtgctctggggttccaaataaacttgaaattcagtctaggccagaaggactgcaactcctaggcaagtactagtgttgaactgggcccagagccagcagactagggtgtgaatgcacacaatatactgagacatcaaccaaggcagctaaagtggtaccagcattacccctcctctaaccccaggctgcacagctcatagttcaaaataatgagactccttccttccacttcaggagtggagacaaaagagtagggaggactttgtcttgtatcttggataccagctcaaccacagaaggatagggcactggtcagtcatgaggccccctttccaggccctagctcccacttgacatttctaggcacgccctgggccagaagggaaccagttgcctagaagggaagcacccagttttggcaggatacatcactggctaactgaagagcccttgggccctgaataaccagcaatgatatccaggtactatgtcgacggccttgggtgagactctgagacttgctggcttcacatgagactcagcacattcctaactatggtagctatggggtgagacttcttctgcttgggaaaagtggagggaaacgtaaaggggactttgttttgcaccttaggtaccagcttggacacaatggggtacagaaccaactgggctcctggggtccctgattctaggacttggctcttggatggcatttctgaacctgccctggggaacagtggagcccacagccatgaagggtgagtcccaggcctagaagcattcaccacaagctgactgaagagcccttgggaacactggcagtagtgtggcagtactctctgtgggcctgaagtggcggtagccatccgatgaggctctcctgcctttggaaagcggtagaaagagtgggaaagtctacatcttgtgatttgagtgccagctcaggtgcagtacaataaagaacagaacacagggtagactcctgaggttttttactctagtctctgactcctagatagcacctctgggggcctgggggaacttgtcaccctgataagaagactctagtctctgactcccagatagcacctctgggggcctgggggaacttgtcaccctgataagaatgacacaggcctggctggctttgctacctgctgattgtagggccccagggccttgagcaaacacaggcagtagctaggcaatggttacagaaggccttgggtgagacccagtgctgtggtggcttcaggtctgacccagcacagtccttggtggccacaggggtgcttgtgtcactccaccctgagctccaggtgtctcaaaacagagagatagactgtttgggagaaagtaagggaagaaaacaggaatctttgcctggtaatccagagaattcttctggatcttgtccaagattgtcaaggtggtacctctacaagtctgcaagaatcacagtgttactgggcttggggtgccccctaaagcagattgagcttagatcacaacactcaagtccttttgaacatctggaaagccttcctaagaaggacaggtacaaacaagcccagactgtgaagattacaatacctacctcttacaattaatagctaaatgcctagacacagagaaacatctacaagcatcaagataatctaggaaaatattacctcacctagtgaaataaataaggcaccagggaccaaccaatcctggagaaacagagatatgtgacctttcagggagagaattcaaaatagctgcgttgagaaaacccaaagaaattcaagatcacacagagaaggaattcagaattctatcagataaatttaacagagagattgaaataatgagaaaaataaagcagaaattctggagctgaaaaatgcaattggcatactgaagaatacgtcagagtttgtttttcgtttttggttttttttttttttttttgacagagtctcactctgttgcccaggctggagtgcagtgggcgatctcggctcactgcaagctccgcctcccaggttcacgccattctcccacctcagcctccccagtagctgggactacaggcacctgccactgcttccggctaattttgtttttgtatttttagtagagacggggtctcaccatgttagccaggatggtctcaatctcctgacctcgtgatctgcccgcctcggcctcccaaagtgctgggattacaggcatgagccgctgcgcccggccacatcagagttttttaatagcagaattcagcaagcagaagacaggctatttgaaaatatacagcaagaggagacaaaagaaaaagtaataaaaaacaatgaagcacgcctacaggatctagaaaataacttcaaaagggcaaatctaagagttattggccttaaagaggaagtacaggggtaggggtagaaaatttattgaaaggaataataacagagaacttctcaagcccagagaaagatattaatattgaagtacaagaagtttatagaacaccaagcaaatttaactcaaaggagactacgtcaaggcatttaataatcaaactcccaaaagtcaaagataaagaaaggatcctaaaagcaggaagaaaaaagaaacaacatacaccgtagcttcaatacatctggcagcagacttttcagtggaaaccttgtaggccaagagagagtggcatcatgacctatttaaagtgctgaagtaaaaaacttttactgtagaatatcagatctagtgaaaatagccttcaaacatgaaaaagaaataaggactttccaagacaaacaaaagctgagggatttcatcaacaccagacctgtcctgcaagagacgttaaagggagtgctttaatcagaaagaaaaggatgttaataagcagtaaggaatcatttgaaagtaaaaaactcactggtaatagtaagtgcacagaaaaatacagaatattataacactgtaactgtggtatgtaaactacttttatcttaagtagaaagactaaacaatgaaaaattatgaaaaatagtaacttccacttgaggagtggaacaagttttcgagacacagacagtacaataagatataaatagtaacaacaaaaagttaaaaagtgtgggaacaaagttaaggcatagagtctttattagtttttttttttttgcttgctttttgtttccttgtttatgcaaacagtgttaagttgttatcaagttaaattaacggactataaaatagtatttgcaagcctcatggtaacctcaaaccaaaaaacatacaatggatacacacaggcacaaaaatgaaaagcaagaaactaaattctatcaccagagaaaatcgctttcactaaaaggaagacaggaaggaaagacagaagaaagggaagatcacaaaccagccagaaaacaaatcacaaaatggcaggagtaagtccttacttatcaataataacattgaatgtaaatggactaaatgctccaatcaaaagacatagagtgactgaatggattttttaaaaaagacccaacgatctactacctacaagaaacatatttcatctattaagacacacagagtgaaaataaagggatggacaaacatattccacgcaaatggaaaccaaaaaagagcaggagtggctacagttaaatcagacaaaatagatttcaagacaaaagctgtaagaagagacaaagaaggtcactacataatgaaaatgggtcaattcagcaagaggatataacaattataaatacatatgaacttgatactggagcacccagatatataaagcaaatattagaacaaaagagagatagaccctgatacaataaaagctggagacttcaacagcccactttcagcactgaaaagatcttccagacagaaaatccacaaagaaacttaatctgcactatagaccaaaagaacctaatagatatttacagaacatttcatccaactgctgcagaacacattcttttcctcatgaggcacatggctcattctcaaggatagaccacattttaggtcataaaacaaggcaaaacattttaaaaaatttgagataccaagcatcttctctgaccacaatggaataaaactagaaacgaacaacaagaggaattttggaaattatacaaatacatggaaattaaacaatatgctcctgaataaccagcaggtaaatgaagacggaaattgaaaaatttcttgaagcaaatgataacagaaacacaagatgccaaaacctatgggatacaggaaaagcagtactaaaaagtaagtttatagctataagtgcctacatgaaaaaagaagagaaatgtcaactaaataacctaacaatacatcttaaacaacttgagaagtaagagcaaacctaatccaaaattagtagaaggaaagaaataataaaatcagcgcagaaataaaagaaattgaaatgaagaaaacaatacaaaagatcaatgaaacaaaaagttggttttttgaaaagttaaacaaagtggacaaacctttagccagactaactaggaaaaaagattcaaataaataaaatcggagatgaaaaaggagacattacaactgacaccacagaaattcaaaggatcattagtgggttactacgagcaactatatgccaacgaattggaaaatctagaagaaatgaaaaaatgaaaaaagtcctagacacatacaacctatcaagcttgaagacacatacaacctatcaagcttttgaagaaatccaaaacctgaacagaccaataacaagtaacaagattaaagctgtaagaaaaagtctcccagtggaaaaaaaagcccgggacccgatggcttcactgctgaattctacaagcatttaaagaagaactagtaccaatcctactcaaactattctgaaaaatagaggaagagggaatatttccaaactcattctatgaggccagtattatcattggctcattctcaaggatagaccatatgttaggtcacaaaacaagtcaaaacatttttaaaaaaaggaaatatcaagcatcttctctgaccacaatggaataaaactagaaaccaatagcaagaggaattttggaaattatacagatacatggaaattaaacaatacgctcctgaaccacagaaattcaaaggatcattagtggttactatgaaccactaaagacaaaaccaggcaaagacctctcaaaaaaagaaaactacaggccaatatctctgataactattgatgcaaaaatcctcaacaaaatactggcaaaccgaatttcacaatacagtgagatcattcatcatgaccaagtggggtttatccctggcatgcaaggatgtttcaacatatgcaaatgaatccatgtgatacatcatatcaacagaatgaaggataaaaaccacgtgattatttcaattgatgctgaaaaaggatttggtaaaatttaacatcccttcataaaaatccccaaaaaactggatatagaaggaacatacttcaacataataaaagccatataggacatactcacagcgagtatcatactgaatgaggaaaaactgaaagcctttcccctaagatatggaacaccatgaggatgtccactttcaccactgttattaaatgtagtacttgaagtgctagctagagcaatcaggcaaaagaaagaaatgaagggcatccacattggaaaagaaaaagtcaaattattcttgtttacacatgacataatcttatatttggaaaaacctaaagactcaaccaaaaactattagaactgataaacacattcagtaaagtggcaggatacaaaattaacacacaaaaatcagttgcatttctctatgccagtagtgaacaatctgaaaaatacatcaagaaagtaatctcatttacactaggcacaaataaaattaaatacctagggattaacagaagaggtgaaaagtctctataatgacgatgataaaacactgataaaagaaattgatgaggacaccaaaaaatggaaagatattccatgttcatggattggaagaaccaacattgttaaaatgtccatactacacaaagcaatctacagattcaatggaatccctatcaaaatacagacattcttcatagaaatagaaaaactatcccaaaatttatatggaaccacaaaagaccctgaatagtcaaagctatcctaagcaaaaagaacaaaactggaggaatcatattatctgactttaaattatatttcagagctatagtaaccaaaacggcatggtactggcataaaaacagacatatacaccaatggaatagaatagagaacccagaaacaaatctacacacttacagtgaactcatttttgacaaaggtgccaagaacatacactgggaaaaagacagtcttttcaataaatggtgcttggaaaactggatatccatacgcagaagaaagaaatgagacccctacctttcaccatatacaaaattcaaatcaaaatggattaaagacttaaatctaagaccccaaaccatgaaactactacaataaaacattagggaaactctccaggacattggcccaggcaaaaatttcttgagcaatatttcacaagcccaggtaaccaaagcaaacatagatgaatgggatcacatcaagtttttctgtacagcaaagaatacaatcaacaaagtgaaaaggcaatcaacagaatgagagaaaatattttaaaaccacccatatgatgagggattaatcatcagaatatataaggagctcaaataattctctaggaaaacatctaataacccaatcaaaacatgggcaaaagatttgaatagacatttctctaaagaaggcatacaaatggcaaacaagcatgtgaaaggtgctcaacgccactgatcatcagagaaatgcaaatcaaaactacaacgagatatcatgtcactccagttaaaaagccttatatctaaaagacaggcaataataaatgctggcaaagatatggagaaaagtgaaccctcgtacactgttagtgggaatgtaaattagtacaaccactacagagaacagtttggaggttcctcacaaaactaaaaatagagctaccatacaatccagcaatcccactgctgggtatgtactcaaaggaatggaaacattgtattgaagagatgtctgcactcccatgtttgctgtagctctgttcacaaaagccaagatctggaaaataacctaagtgtctgtaaacagatgaatggataaagaaaatgtggtacataaacacagtggaatactattcagccataaaaaagaatgaggttcagtcatttgcaacaacatgaatgcaactggagatcattatgttaagtgaaataagccaggcacagaaagacaaatatcacatgttctcacttatttgtgtgactgaaaaatcaaaacaattgaacccatggagatagagagtagaaggatggttgccagaggctgagaagagtagtagggggtttggggggaaggggggatggttaatgggtaaaaaaaaaaaaatagaatgaatgggacctggtgtttgatgacccaacaaggtgactatagtcaatagtaatttgtttgtacattttagaataactagaagagtataactggactgtttgtaacatgggagataagtgcttgaggggatggatgccccaatttttatggtgtggttgtcacacattgtatgcctgtgtcaaggcatctcatgtgccccataaatatatacacctgctgtgtactcacaaaaattaaaaattttaataaatgttgattgtcctatttaattattctcaactttccgattttatttcccatgtaacagtgttgttttaggagagttttacttgtacatttatttatttacttataactagcaagtatgaaggcaagagactctggcccagagcagctgtactttcctctaggtctgcatctccagatggctctctgccatgtcctggcaatggctcttgtagtttctgcatggccaaccaggctccaggtagccttcctggttctccctgctactcaggtacccctcccgcaggctggtccagtgctctgttcttcctctgtcacagtactcatcagtgtgggactcttcccttgactctatccagacccctgctttgttcagcactgattgtcatgcctagaacaaccgttagctcataagatgcactcaatactccccatgcagccatgagcaatgcctgactgtgggtggcagggctaagcaattattcctggatgtaggtccacagcaggagtcagcatgtcacatttggccaaggactttgggagaggataaattcttaaaaagttgctatgagctcaagttacattggtttttttgtttgtttttgtttcttaagtagcaggtgagataagacattccagagatagagtgttctttttttttttttttttttgaaatggagtctcactctgtggaccaggctggagtgcactggtgtgatcttggctcactgcaagctctgcctcccaggttcaagcaattctcctgcctcagcctcccgagtagctgggattacaggtgtgcaccaccacacctggctaatttttgtatttttttagtagagatggggtttcaccatgttggccaggctggtctcgaactccttctgacctcaggtgatctgcctgccttggcacctcaaagtgctgggattacaggtgtgagccacagcactcggcccaagatagagcattctctagagcagcagtctccaacatttttggcaccagtgactggttttgtggaagacaattttgccaccaggtcaagggtggggagggcggatggttttgggatgaaactgttccacctcagatcatcaggcattagttagattctcataaggagtgcaagttagatccctcacatgcgtagttcactggggttcacatcctatgagaatctaatgccaccgctgatctgacaggtggtagagctcaggcagtaatgctcgctggcctgcagctcacctcctactgtggcctggttcctaacaggccaccaaccggtactggtccatggcctgggggttggggacccctgctctagagcattctagagacgtctatatacttcgcattctgttactgaaagacattcaattagttcagtttcagagctctgccacagaaccaccttcagcgaagattcaagtgctgtaaatgaggctggatccagaaccaggtcccatggaaggaccatcatgggagtgggagtgggttcagaatctagctttcatatcaggagataagtgtgactcagcacactctggtctggatgcctctgctgatcacttccctagactatgtaagagcactctgtgcctcaatttccttatttggaaaatgaagagaataagcacacatacttcatggggttgcatgagaattaaaggaactagtatttcatgaagtccatagtgcctggcacacagtaagtgctacaaacaaacaacaaaagagcctgtggtcaccttctagtgcatcttaactctacccccagcacaggcttaacttcccaagaactgcagcgcttcccccagggcagaaagccgtcttcctcttgctccttcctctctacctccactcttagttgtgttccttgggacccagaatggttttccagttcttgacaagtcagagatacctcagtatccatttcctgtctcagattctgagcttccgagggtacagctactttgtaaatggctgcactcagtatataaatgttcattgaatgaatgaatacatgcatgaagcaaaggcggagcccacttaaaggaagcctgtggctttgtcattggtttcggaacttctcagccttccttttatcctccacttggatcctctgcctctgttccatgtccttgatttctagctccatggcaaaggagtcagttttctgtctgtccttcttgtctttcatttctctttcacccctgattattgtcctatggtccttaacttcacatcctgaagcctgaagactagtgtctccactcaactccttggctggccagggctctgggtgtcttgctaactggggcccttctcacctaggagtggtgcagtcccaagcgtgcaggctagagggcatcatctgttccgacaaggtcagtagtggcagaagcagcaccttctcacttgggccagaggttcagctttttcagaccagccgccctatgactggggagaaagaactcaagacttcacctcttcttcctcacctcctcaatggctccaaaatgtccctcacacctcactcaagaagagcaaggtgtaagtctagatgagatacccctgaggcagagtgcaggcagggtccttctgataccactaggtggctagaaatggtgtctaatgtgaaagttgttggatagtagaaatctcagtctctctgtaggaaaccagtgaatgaaaaagtactttgaaagccagagtttgagatcagcctgggcaaaatagcgagacaccacagctacaaaaataaaaaattagccaggcatggtggtgaatgcctgtagtcctagctactaaggaggctaagatgtgagagttgcttaaacccaggagtttgaggttacagtgagctatgactataccaccgcaccccagcctggatgacaaaacaagaccctgtctctatatgtctctctaaaaaaaaaaggtgctttgaatttgaaattagggaaacacatcagtaagcaagtcagttgacctattatgatggatgatgttggtctagattctgagtgggttaccaaaggaaaacagtcactgattcttagaacgtctcagagtgtagtttctcaagttcttgctcacagttcattgcaattccaccgtttttttcaactttcttcaatacctgctcctgaaccccgcccagcatccccgggtcaccatacctcaggtacaggaggtagaagtgctctctggcctcaggaattttgttccatttttctttactggaaggagtaagggttcttctgaccctgccacattctccatcctcaaagctcacaaacccattagtctgtcaatgggtttgtgacatactaacccttgctcaaaccagactttctctaagaaatctcagataccctccttgcccctcagaaggaatctcagtgcctttctcctctcctcacccaaatgcctattatgaacatagactgaattttttaggaatgtcctgataacaaaaatccttcccatcatcccctttatgtcgcctcatttttctcagactgtgtgtcacaactggggagttgtggtcaccatgcccacaggtattacagcaaagcctcttaaccttttgtgtgccatggattcctttggcatgccagtgaagcttatgaactcagaataatatttctaaatgcataaagtaaaagaaatagggttataaaggaaaccggtagtagtaaaatacagctatcaaaatgtggaaatgacaaataggtaatatatatgtgcttctttattaatgcattaatgcatgatctagcagtaggcctacaaactgctgacatttctaagtagtaatgaatataagtgatattttgagatacctgaaaccactgtaatgtgatacaaaaatatttgtgatttccatcagtggcaaagtcattggtactgctaatactattgtggtttgtatttgttgcttatccttataattgaagaaaatgctgaatttcaattagaggttagcaaaaaaaaaaaaaagacatagtgtcttctcatctaccttctcccaagttaagaactcctgcattagagggtctgttgctttcatgatgctatgaggtcccatggaggggggtcccaagagaccacatcttttccactttggtagcccttgggtcaatccagctcagtgctcacacatgggagactctctgtgcttgtttgtgaaattaaaaggaaaagaactggctgggtgtggtggctcatgcctgtaatcccaggactttgggaggctgaggcaggtggatcgcttgagcctaggagtttgagaccagcctgggcaacatggtcaaaccttgtctctactaaaaacacataaattagccaggcatggtggcatgcacctgtaatctcagctacttgggaggctgagtcatgagaattgcttaaacccaagaggtggaggttgcagtgagcagagatcacgccactgcactccagcctgggtgacagagtgagactcggtctcaaaaaataaattaataaaataaaataaaagggaaagaactggtacatccctactctctcaggtgaagaaactgttaagtcaagtccttgtctggatttttgttcccaactccaattccagaggaggaaataaatgcccagtgtctcttgctctgcaggcacggggcaggaggaattaaccaactttggggatccagctatgtcagaagaagtctcaggagaaagcctggaaacaagttgagctggttaaacagagcatgatgaaaaaacgcaggaaagggaaatgatgtcactcatgctggcagctttgaggacaaggaagcgaaaatgtacgcttctgatagtcaactaccccgcctatcccaccctgctgtctcccaggaaggtagctggaactgcaagtggggcaaagctcccagcactaccagccagtggcaagggccttcacctgcccaccttttgaactgaggtttttcctccagcagaaccgaaggcccatgtgcttccctgtaaagtgatgcaactgggcaggaagctcagatgccagcaactgtgatgtcctagatagggaaaaccctgcattgcaaactcaggtcttgctttggaaaaaaaggagtggctggatttccttcttgctgtctagaaaattgtttcctgcccaaaaatggcttaattaggaagctgagtttgtttcctaggaagggattctccttctcttccttctgcgcggcttacctttacaatgccactggcaccgattatagcctgactcccgggtttggaacctcactttctcaagctggcttgatgtgcccatgaaatgtacccctggcttctctaacacagttgcatcccccatctgttccactggagcactagcaaggtgccaagcacttgctgcccttgaagaccccatggttcatgcgcagctattcccacatctctcccccactataagagtcttcagtggccctatggccttaagggggaaaagtcaagaattacagaattaagaaagccaagtagaaaggggcttaataaatcatttcatttgttttcccataatttacagataaggaaaggaagttattttaccaagaccacacaatgaggtgaaggtaaagctagagctagaacttcagtttctagactcccagatcaaattcatattccttggtatggtattcttggtcactgatattatagccatatttccaatttgattctccatggcttctccccatgaaaccgagctccagccaaacaaatctatttgccagtcctcaagtaccttttgggtttttctgtcctctcatttctgttttgagtgtcctttgttcaacttcgccctcctctctatccctccctagcatctctgctcatttaaattctgcctacccttcaaggcttatctcaagctctgctatgtgatagtgccctcctctgtgccccttggcacttaactttctgcgcgctcagcagtactgatcttggttctgcaaacgtacctcttatcctccaacaaggctgtaggcaggtagtggccagagacctgcccggggcatctctgtaatcctcacagcattcagcacagtgtcttgcacatagtaggcatttaataaatatctattgaaagaatggcttttaagatctatcagacacaaggatgataaaaatgatcttatgtgtctataggtttatataaatatgcatatatatatatataactcctgggtgaggcagacagacgatgtaggtgttatctccattttattaatgaaactgaatgcccgaaaggtgtaaaaactagacttgggtcacccaagttcaccctgaaagttggtaagaaagtgaatattaggattgggtctcctggctctcagtcccatgtgatcttcagtgctaataccctctacattgtttccactgaagactcatttcttctaccagaattatgagatgggaaaagcttccttctcagtctcatttttaagaaaagctatttactataggagtttctcatgcgttaagagtgtcatgtactggaatgaacacttactgaatacaactttggggtctgccttttaccagttgaatgaccttgggcaagttacttcacctctctgaactatggtttccccatgtatacaatgaaggaattagactcgtacttaaaaatcacttcttgctctaacagtccaggaggaatagtctatcattagataaggaaattcttgccattgaggtag

SEQ ID NO: 2 - DNA, 181089 bp, Artificial Sequence
  modified ctd-3174k1 bac sequence ("hil10bac-gcc")
aggcagccgttaacaccttcagaaagagctaagatagaagggatgatagaggccatcctgaccaatattttgaggtcattttctgggtcagaaatttttgtgactgagtcttatgtatatatatctgtcacttttgctttgggggaatttctcattttatcacagaaatactagcctatgacatgaagactatttctctctggctctaagccatttttctttccaagagtgggtttttagtggacagagcttcttctgtaaatcatgctccttcttgcaatattttgtttgcggtactagcagtggatacaaaggctgctttatctgtgttcatgcgcagatccgccagcctgtggatgatcctcactcatcaagagagtgttagctgaaaatttccaagagatccacctccataaatttccaccctctgtcactcattcataatgccacgtcatagtaaaacaggaaacttttactccatgatggtgtgaaggctgtgtgggggaatcttgaagaaaaagattgtcacaatgtatcctatcatataacccagtcatgcaaattaacatagacctatattctgtaacagattaggccaagatggaaggaaattgaggtgtggaaaatttatgttgctctaaaatggaaagaatagcccatacctcttcaggcaattcctgcccagaaatagcagatatcatatttctgacattaagaaggatatgtgagtatatgtctgctcaggatctatagtaaggaccatgagcatggactttgggtcagaaagatttgggtcctgtccttcgctagtggaatgactctgagaaagttatttaatttctctgggactcagttttcttgtttatacaacagataagtgaggataacagtacagacctcatagggctgtgtaagagtaggataaggtttggctgtgaatgatagaaaacctagaccatcagtcacttcaacaagaaggccatttattgttctttcatataaaagtctgggtaggtggctcattgctgatatgatggatccaggttcaccagtatacagactctttctgtccttttgttctgtcttcctcaacctgtaacctccatttcaccatccaagatggctacagctgtgaaatttttattccagtcagcaggaaagaaaaaagagaaggagaagaagaaggacatacttctttccataaaccacttccatttacaagtcattggttataacttaatcttatgaatgtaaccggctatagtggaggctgctcaagtgggaaatgtaatttttattccaggcagtcttgtgcttagctaaatatggggtgctctttactatcaaagagaggaaaaaaaggtgttagcccacccaactagcaatctcagccacggatcatcatgagatttaaatgagacaatgcaggtagagggttgagcacagtgttgggcactcaggaagcactcaaaaaacattgtcatcgtcatcatcatcatcatcatcaacatcatcatcaccatcatcatgagaaggtgaggaatactttgaaactgtgacaaggcattttcttattttaacctggtcttgctgctaacatcacccttggccacctcccttttaaggtgatttgagtttcatcttttatgatacctttgaacatgccttcatgaaacaaaactatataaaaaggaaagcaagggaaaggtgaacataggactcaggatgatggggtcttgggccatgaaaatggaggggttgggggagtgtgtgtggaggaatcatctagttagatgtaaattattgtcgaagttctagtttttattttgggtagtggattcacaggtgcttactgcattattaaaaataattattaactaacaataaaagtggagctgcatggatcaatgatccaatgacgagagtgtgtcatgaatcaaggattataattaatccatttctatgtacctgaggtccttaaattgtctttgtgtgtactatattgcatggcatatgtgtttgcatgttaatagtagataaaaatagtactttctatttgcatagactttcaagttttaaagcgcttttacacatccataaaaactgtttattaagtagttcattacagatggctaagagcctggtgttacacaaataggactttggactgcttcctgtaggaaagtttttattttatccttgcacaagccctacaaagtaggcaaggcagatgttattgtcactattttgcagatgagaaggaaggaactgagagagcaaggggctctcatgaggttacatagcgagtcagtatcagaatggaacttaagactcaggatctcttggccagtgcttctgcatttagcacatcttactcctcaattattcatccactaggcgtttattctgttacatggcacattgtgctcatgtgttgtgttcatatatgtgtgtgttttctggtgctgtgtgtgcagttcatataatctctatccactatgtatgtaccctcagagtccctgtgtgccccctaggcctatttggctcttgcagctccgggaggactctcaggtgggaattcagttgtcctgttattcctagatcattgggcctcaccatctccctggagctccagctaggtaggaaagcagctttgatatcaggaatagatccgtaggccatgagcacagagcagaggagcaagccagcaatgtctaaataatggtgatatttaatatttcatgataatgtatagtttatgctttaggatgtgttctcataattactatttcattttattctctctcagccccgaaagtagattttgttgtttttttcttttctttttcagatgctgagagatgttacatgtcttgctcaaggtaacccagttggaggacagtcttggcttcagctcatttgtctctagatcctgtcatcttaccactgtgccttgctgcctctgaaaaggcagaaggaagttattctctttctagctttgtggagaaaagcaggtgatacctcaacaccaagccatagggagcttccagtgactctgcaaagaaaaaaaagaccaactcagactccagagcagccccaccagagcctgagcagttggagccttccaccttcccacccctgcgttcctcttgtccttgggcatctcctgtgtgtgcttcggggaggtgatagcagtgctatagaagtagtggagtgaagatgttttcctatccccgtggccttagatagtgtctttgtctttgaagagtcaggggcatctggggagctgtctaaccgtatctatcctgtagactcgggaggaagctgctggctgctgtagacagaagagaatccctgtgcttcgggctcctaggaaggtgtctgccatcctctctgtgccactgttatctgtcttcttccccatcagataacaccatccaccgctgcagggctgagcacggcaccttgtacatggagctaagcagatgctgcttgagaagagcatatgtttgtgtcgggggaaacatgtctctccttggtccacagagccctacctgccccaggaaaggacagtgttgggagggtaactcccacccctcactcctccccctcattcctgcctccacaagcatcttctgggaaaggtgaatgagggaagagacatttgcacttgtcccttacctacctaagttctatccccagtggccacttctgggggtgttgtcttctctctggagttttgggggacctattagggggcatgtgtggccataggtcaagcctcattctctaactggccttaccaagacttaagctgaggttttgtgttcacctgtctgggttgcttgccatttctcaaatgttctgccagtcagaggtgggaggaggtcggcaggaatgtacttggtcatctcgaaccccatcagaatgtgtgtggaggcctcctggcagcttctatgcagggtccagctagatccctgggcttttcctgagatacacggggctaacccacttcttacggattaatttttccacatcggaaatcagaagccattccccagggcctccccttcagtttcattatctcctttgactctgcccacaacctttgaaaaggtctcgctgttcttcccacggagagagaggtgcaaggcttgctcagcctcacacagccaatccgtggcaaaggatggcgggaattcaggtggccccaatctcaacccatcctcttcccaccctgtatcctttttagtttatttacaggaaaacatgttcaaaggtataattactaaagtgctcctggttacacaataatacgtctttactgaaaaacaataaattaatgagaaaagagatgcaaaaaacctcagaggaaaatgttgaagttagggaaatatttaatacgcccgcctttggctcacaccttttcctgggatgaatgacccctgtgattccagctcccccccacccccacgaggtctcatctagctggatacctacaagccatccctgtccttggaaatacacccctctcccaattcgctgccgctaagaagcccagacaattggagaggagtggattttccatctgaattatgcagctcctttgacacgcctcccctctccctttgcatagccttggttaagaactagcatttcttcgtcccctctccctgtcccctctcactgtccgcgaggcagcagcccccagcctactccgcgatcctcccagctcccggcaccgcgcgtcctcccctttaaggcccgcccctccccccacgccacgcctccccaggccccgccccccgcccctcccctttaaggaccggccccggacgcagacgaggctgtgacgcggccgccggcccggggctgggtacattgtcgcgcggccgcttccccccggccgggcccccgccgccccgcggtccccagagcgccaggcccccggggggagggagggagggcgccgggccggtgggagccagcggcgcgcggtgggacccacggagccccgcgacccgccgagcctggagccgggccgggtcggggaagccggctccagcccggagcgaacttcgcagcccgtcggggggcggcggggagggggcccggagccggaggagggggcggccgcgggcacccccgcctgtgccccggcgtccccgggcaccatgctgtccaactcccagggccagagcccgccggtgccgttccccgccccggccccgccgccgcagccccccacccctgccctgccgcaccccccggcgcagccgccgccgccgcccccgcagcagttcccgcagttccacgtcaagtccggcctgcagatcaagaagaacgccatcatcgatgactacaaggtcaccagccaggtcctggggctgggcatcaacggcaaagttttgcagatcttcaacaagaggacccaggagaaattcgccctcaaagtaggtctggggcccggggaggggaggcggggccggtcccgggccctggagctccacggcgtcgggtgcccgtcccggcctgggtcgcggcgcggggcggaggggtggccgcggcggggcggggcggggcggccgggccggcggtgccgagtgcggcgcgggcggcgggtcccagcgccctcgcctccctgaccgcttccggccgctcccgggcgggagccctgggacccgctcctggggactcaggggaccctgccattttggggtttgagcgggatccagccgagtcagaacggttggcttcgggacttctgctaatttcactccatctcaaggaagtgattttggggttggtggttccccgtcctctcctccctcctttttctctctctgcgggcacaaaaggcccattactcattgagccggttggtcggttggtttggagaagtcggatcgcagaggtttatttagcctcgctccttatttgggagccggaatgtgtgatttcacttccccgagcctcgcgagggcagccgggccgccttggggcgcgccgggcaggaggtgtgcggcgggagggtcctgggtgtcccccggctgcgggggcgggattatttggatcccggagctggccccctcagctggccccctcccacgcccgcgcggggcggctccggggagaggccggcggtgtccgcggcccggctgatcattgtgaacagagtctgtaacccgcggccgggcccgtgctgattccgcctcctagagagggccacttgctgtcctggactcgcgccgtgatgggcagtctgaggaaacattatccttgagccgggggagcccatcccttttctttctttaaggggtgtggtggtggggagaataaggattcaagtgagaatatcgacttcagaagttaaacacaatggactgggaggtctcatgagatgggtgggtccgcagtgaagtgtgagccggtcttgcagggtcaccaacaaggttttcctctcacaggggtttcaggtcaaaccaatctctaaaggtgacgcctcaggtctgtttcccctggggtgtctcaatgattggaggaggagaaaaatacttcctgtgttatatttttctcttccccttcagcccccacagcgagctgtatttcagttgtcaagtacaaaactcagaaatgtggtatgggtggaactattggaatatacgatcagatgttttaaaagaaacaccagtacttcggggttgtacggggcaagcatgttccatttctagattttaaggcctctagaattgttttcctgctgctctcatactcaaccctgttacagtgctttgctttctactgtaagttattgctctgggatctcggttgttgtttagtgttgactgttggagaggggataagtatcttcaacacttcaacatttgtgtcttagacttctctttccctactcataactgaagggaaaggaggaggaggagttgtttggattgagcatggctctgaccttggggactggagttgggtgaatacagtttgaccacagttaacctgtatcattgaggaagtgacagacggtctttacaggagtgtttgctgtcccctctgagacaccatctgccttcacccattagtagtttggggacactggctgttcattctcttggatatttggaatattatgtaaagacttcagaacaaaagctcccaacttctgctctgtattctgtttaatagacacacgcacaaaatcatcctataaaatgcttttgagtggcaattcagatttctcttgtaactaacgagagagaggtttacatatttttctactttgaatagttttggaaggaaaaatccagcagcgtgttaaataacactcatagtttatccctctcaggttagaagtgggcgaagagtgaagtcagtctgttttgacaggcagcctgctcccagatcttttaagttgactcaactgttaaattgtggatttcccacacacgtctttgtgttaaaacttaataatggaggaagaaaggagagacaaggcatttggagactgacagcagtgttaacagcacttccatatccaaatattggctgagacataattacagctgtggggggaatctggttcaaagaacgctgttccagagacacacaccaaagagatttctagatcttgaattttgattaacctcaggtgctgagtagtgaaatggttttcaaaaccagaagtctagtgattataaagcaggagaggaagatggagtggggcaagagggattacccccttgggaaggtgcctgagaaaaggggaggagacctctattctacagtgtgccgaggccaatgctgggggctagggcagagctggagggcaggagcccagcctctgctggggttcagaagtctgctatgttgcagccctgagagttgatgggagctggcagctgcttagatgctctcctctctgcctatagtcggtgacctcttagccctgttaagtgaaatcagcatttgaaaaagagtcccagctcaccctgctgcttctctccctccacctcagagagctcccatttaaatgcttttggtgggtgctttgacctcacctcaccatctctcctggctgcttttgctaagttctgagtcatgcttccagtcagagttgcaagggacttgaaaggtcattttgtccagcccccttattttgcagaagagaaaaccaaggcccagagtgagggagtgacttgttcaaggtaccatagccattcacttggcagaggcaggattggaacccaggttgcctgactcccagtctcaggcttcttcccacttacttcctaactgagccacgggctcaggcacatggccacctgctgctccagggtgcttccagcctgaggagctgttctgtcacctcaggccctgactgacaagaggggaggtcagcgaagggggctggatgggtatttgctgctcctgagaacagtccccaaagttggaggggaacttcaacagtagcttcatgcatttttttaaccactccctcccccttttaagagagtatttgataggcaccttacttactattttttgtacaagaacatgggaattctattatttttatttttattttttttgagacagagtgttgctctgtcgcccaggttagagtgcagtagcacgatcttggctcactgcaagctctgcttcccaggtccacgccattctgcctcagcctcctgagtagctgggactacaggcgcccgtcaccatgcccggctaattttttgtatttttagtagagatggggtttcactgtgttattcaggatggtcttgatctcctgacctcgtgatctgcctgcctcagcctgcctaagtgctgggattacaggtgtgagctaccgcgcccggcctgtattacttctttgataaggacacctagtctcaacccacttgtgtattaattagttgtattccccgggagggttcctcagctgcttgccgcttcactgtgtcatggtgacccttaggtgttagctcaacaaatttaattaaagactgtatcgttgttctctgctgtgcaactctgattaggtgaagcatgttactgctttataaaatatagaatgttgtcgtaacttatctctgtgtatctttccattgcgtggattagagaaaacaaggtcctgtagtttcttttcctttcctttctccagcattcctctctccctaggtcatggaagtgccactgcgatgtggcttcctttgttctggtgaaggggagatgattggagcctctcatgattattctggatgctgttggagggaaatgccagagctcccacatccccacagtacaggcaccatctcctttccaacacacctcatactgtgtacctgtggagggcaagacagttagtgtggctaggtgagaggcagtgtcccaaactggagtttgctggagttgtcacaaggttaggaaaatttcattgaccaagccagcctcttttatatgcaatatggttacaggtaggtaacagtttgctgaatatctatcataagcttagttgcatggaggatacacatgtaaaaaatggcctgtaaaattttgagtcaagaaacttatttagagaaggtgaaattaacacatgtaggctagggctgcactgtccaatctggtagccactaccctcacatagctaattaaattaaaattaattaacatgaatggattaaactaaattaaatttgaaaaatcagttgctagccacacttcaagtgttcagtaaacatgtggctaatggctatcgaattgaacaatgcagaagaacattttcatccttgcagaacgttctcctagactttgttggtctgggagctaaatcgtgtggctgggaatagaggagctttgaaagaggggaatctgtggtgactccaggagctaagggaggctccagctggggtcagtgggacatggctgtgcctctgaggagtgagcaagtctgtgagaggtgtggtgacattggcctggctagaactgaggggaggaacaggaggtcagagtggtcaggggttggtggctccaaattgaagctaactcatcttgtgtcaaagcaggctttaaagtgtttgaggggcatgaaggtgtcaaaaaaggttaggaatcattgaagatgggcttacagaattatgagggaagggtcaggtttgtggtttcagagatcctgtccctcctggccgtagccctgaccccagccctgacccctggctcctgcagcagggcccttggcatccactgaggcaagattgaagctgggtcagctcactgtccttttttacttgtgaattctgggctttgactgagcttggagacaatctccagctaagatacgggatcagtggctgacaggaggggagagacaagcagtccctgggccttagggccaaatattggtgggtgtctaggaaacaaaagaacccctttgtgggaggaggaaggtattgggacctgtgatgtttctgctacttgggacctgagaggttgggccatccataattgatgatttttcttatgaagcaggtacaggggattgggaggagggcctggaagagcccagcctcagaactgctggaggcaaacttaatccttgggctaggggaggggccaaagctcctgttagccagagcccaggagtgtgctgagtgggtgccaggaggaatgtcagccaagatggggaagagcagggcacagtcgtctgcatctgagccattgcccagttcccaagcagccttgccatgctctgagctggggttcttcctggtggcgtgatgtctgtggtgcaggattcactctattctcctacctttcctctacttcaggccctgccaagtgtcatgtgaggtctcttttccccctcttccctgcactgtatctttccagatggttctgtgtcctggagggaggtggatgggcagagaagagttgttctttgcagggactgcagcttttcttggtaatggtttgaggcccagtggcaaagcaacccacacttcatagtaacttagaacccacactccctggtcatctttcttgactccttgcacatcactgaggaagaagctggcctagtgcagaaatgttcagtggcatgtccaaggtcttacatggtgtcagcatccgagccacatcttgagacctggttccctgagacctgctcttggtctgggcccctttggtttttggttgctagaagactgtagacctggtggagcaaaactgagctccactaacgcatcagctaggatctttccacatgggttaccttgtaaatgggggcattggtgaagagaaggggccatgtcactggacagtgtaataacgtatggcagttatagaacccaaatcagattgctgtgtaccttttctagtttttaggaaaatactggtattttgtattttaagatatatatatatatatatatatacacacatacacagatatagatatgtagagatgagcttgttaccatgggttatgtgctagataagaaagcaaaaataagtgcatacataaatagaaagcttccagtgtttgtatgctgctaacaagttacatgaccttgaataggtcagctaaactttccaggcctcattgcacagagggtcggctcgagcagctcctgagcaccggcagggtgaggcagtagaaggcggtgctgcaggccagaggtggagggcaggcaggatagcttgctgacttgctccgggtctgaccatcagcagtatctgggtcagcacagatgccctttcgtaagcttagtgcctggctccagggcagcctgtgtccagttaatgaataatcatcactgaccagctgctccttctcttgtgtgaagacttagaaagtgttctatgctggtgactcggcagagaggatagactacgtaatttagcagggtgtgcatcttctctttccttaaaatcagaagaatcatagtgtagtggtggtgcaaagtagagatgaggaactctattccctgtttgagattcctttctcaagttatggggcatttgagggccactgtgatttctggtgcaggctgttccctgtgcacagggatctggttgaggagctaagcgaaggctgaagtccagccactgtctccttgcttggctttgtctttgtgtgtggctgggttctttcaaaggagtgccttctaattcaccaaaggtatggttatggattaggggttgttcttaggttagagttggggactgattcacagagctgatgaggaaattaggatttacattcaggtgaccctcagcccctcagaccaggctgagtaagaagagatatcaggaatccaaggaagcaggaggaaaaggggttgcctggtgatgtctgttctctttcctcctcttcctgcccatgcaaggctagagcagctgtttcagccccggaggtttagactgtggggtcctgtgtgctgggccatcaggtttggtgggaggaggaagaaagccacagtagaaggagacataaagttgggctgggcctctggcagtgaaaggttcttggggtctttattgtctgatcagtaaacacctctgtgtgccagaatgagctgggacaaggccccaaggtcagcccatatttgtatctggtgttctcctccaagaccagccaagctgtgcgctcattctgctgggaacctgagccctccaaaagggtcatatgaaagggcatcttattcttgagggacgtttccaagcatctctgtggccagtgtccatccaggactcatcttagaggtgaagagtggtggccagaggcggaagctagtggccacccgatgggagccttttctgtttcagagcatatgagggagctgagggagctgtactgttgatgccttctctctggctcatctccatgaagattcttttgaaccagaagcaaaggtgaagtctctctgaggggaggggctgaacaggagatctactgactgtccccctgccgactcctccactttcgtcctccggcggggctccttatcctcctgcttgtctacagggagaagatcgagttgttcgtttgctgccattttaatgatccacattgttaggaggctctcagtacacaccggaccttagcagcctggcctcctgcccagggcccagaactgttactcagcccctctgccgaacagctaaaaataaacctgccactgctgcagtctcccctcacagccaggccctgttagctgtcccagtgcttcctgccacaccgctgacctgtttctctcactttctgctgatattctccctgcttgcccctttctcttccagcctgagcttggtaggtgatttggggctaactcactcttctgagtgctgggagacgtgctatggtttttatgtctccaggtgtctagatttgtgtgtatgaaagctccgtgaagctgtcctgcttatttcccagtagggaaagggttagacaaaaaggagagtgaccaagctcatcagagtggatcagaccttctactgtgctcgcctccagccctggcttcctccagttttacctccaagcaggcctctttgccagagttacctggttatggtaacagagttaccatagttatatgctaggacagccccacatgggcagtctgccccaggccttcaacccgactgccctgtcaccgagcatgctacctaccgtgtactcctgccctgttgctacgttatattctccacctccgcagtgtgaggctttgggctaccacattcaaaagtgtgacctcatcttgtcagcgtccaagaataactgggccctggctctcaggatctccttcctgagtcaggccatggcacctctggcccttccagctcagccacatgcagaatgtcaccgagtgcatgggtttcttctacctcttgactgcagtattgatgtgtgtccatggaggtgtggcctcttcctctactccccagggatcctggagacttgtggagcaagatgaggaaaggggctcaggtagctagaatatttgcttagctgatagatactgggcagagtctgacattggcattctgttcttcagcgtggcgttagtattctttctgattttttctaatccctagacaggtgttgatactaatcgtggcctaggagggctctatgtctgctttcaggaattatggtttatttgggggaaggggtgtatggtggagagtgatggcaatgacaaccaagacataggacttgaggaacccactgccttcagctagagttacatactctgaccatgtgtcgatggcctccttctcccacctctcccctggggccacatttcctctgcaaggaaagatttatctgccaaggcccattggcctgtgcagaggaagagttgggcatagttgctaagtgtttatttttaactctgacagaaggagcccctgtcctcagaatagccataccctctgtctttccctatcccgactgccttccttggcttctgtgattcctagaagaaggttagtaggattctaaaggccaggcttcacgggagctggagaaggctagcttctctaagtgaggaatctgcaggttgctcgtcatgcttggcttctgcagagctcaaagggtcctgcggggagagccctggacactaaaggccgtgtgtctggaacttggagaattctaggaatgcaggtgacctgatgaggaggctgcatgtgccctgcagctcagagcagcctggctgcacagctgagttggacagcccagcaaggggtcatcccataccttctacatccttacaggcacccagatctctggcagatggggaggccacagggagaaaatgagcatatgtagtaacctgccctggaaacgcttgcgcttgcagacacgccaagtgctgtcattccctctgactgccaggctcacgagcatcatgtcctttccagcagagcccacctgggactcttagtgacttcataccctttgtgttctcttcccctgatgtgctttagtgacctgtgctcacagagaggaggaggaagggtggcagtgccccctctcctgggtctcagactttcctgactttatgcatttgatttggctacctgggctcggatactttaaaagaaaataaaattaggtttgaggtgtaaccagagagagaaggaatagagagtagtagggggtgggatgggtggttgaaacatgtggctaactctgagaaccctcagctatggaaggaaggtcttgcccccatgattcttcggcgtgcagtgggggattagtttgcccagagcccagctctgatcatgtagcttcccagcttaagcccttcagtgggtctctctgcctgcagaatacatgagatatccacatctttcccagatctggccctgatctgtttttttttttttttttggaacacatgctttttttttctccccagcttaagtggcttatatatgttgtttctttaacagaactgtgctttccacccccacaccttagcatctatccatctgcatcttctctgtaccatgcctgtcccccgtcctgtctatatctaccttttccaccctgcacagatgctgcttttccagagcctttcgcaccaaaagtgggtcttcccatccttccccatcaaacttgctgatacactcttaccttttatttctctgtttaagtgcatttctccatgtgcaaggcatctctctctctctctctttttttttttaacaggaaggtaatttattaacggaaaatatttgaggagtcctgtgcacagtgaccatggcaaccccccttcctgcgggtgctgtcagaggggttgggagtgacgtcctcaatctgtccgatcttcatacctgagcgggcaagggccctgagggccacctgggccccaggtccaggggtcttggttctacttcctcctatggctcggagttcgatgtgtagggcagtgatacccagctctgggccacatcccgggcagccaacatagcagcatgtggtgaggattcatctcacctgccttcaccttcatcctaccagtcacacggcagatgatttctttgccagaaagatcagtgacatggacaaaagtgtcattgaaggatgcaaagatatggcagacaccaaatacattctctccttcagccacctgaggtctgaggctgatgacctgttcttccttcttttccttcccctttcaaggtgccatttctgcatgttgtttccagactccgcacaggaacgcaaggcacctctttagatatcggattggactgtaaatcccctgaaaacctacatcttcattatttttgtgtcctcttattttcatgtagtgaccgtatgtcctcattaaaaaactcaggccaggcatggtggctcacgcctgtaatctcagtgctttggaaggacaagtgggaggatcttttgaactcaggagtttgatatcagcctgggcaacataacaagaccccatctctacaaaaaattaaaaaggttagccagctgtggtggcacatacccatagtttcagctactcaggaggctgaggtgggaggatcacttgagcccaggaagtcacggttacagtgagctatgatcatgtcagtgcactccagcctgggtgacagagcgagaccccgtctctgaaaaaagaatcctagagtattttggcactgtgcattatatgcattatacttagctgctgaataaaggtgtgataactgagtaatagtggatgccaccgatattaaatgtgatgtactagaggtaatcctcagagtcagggactgtggcagccctgggagtgggatagtactgggctgtgctctctgagactgagctggggtagagtgatgatctctcacattgtctgttctcattcttctgctgctgaaaagctgctcttagtcttctgagcatttcttccctctacccacttggatctgctgactcaagcaggcaccttctatttctgcttacagagttctcattcttacaaggaccctgaccacagtttctcattgatgcctctcctccttctccctgttccaaggcccctcctattcctgttcagtcatggagatgacccttttgccctttggagaactttaactgagggagggacagatgtggagcttgccaactttcctacagctcctggcattttctagttagctacagacacggcacagacacacagatgcagtccattgttttctatctgctggtcctgctcctgtgtgttgcaagagggacgagtgttaaacactgtattagtccattttgtgttgcactaaaggagtatctgagactgggtaatttatagagaaaagaggtttattgctcacagttctgcaggctgtacaaggatcatggcaccagcatctgcttctggtgaggacctcaggaagcttttgctcatgggggaagttgaagggggagcaggcatgtcacatgtcgagaagagggagcatgggggtgggggaggccctcgactctttttaacaaccagatcttctatgaactcagagcgagaactcactgccacaaggagggcaccaagccattcatgagggatctgcccccaagacccaaacatctcccaccgggccccacctccaacactggggatcatacttcaacatgagatttggaggggccaaatatccaaactatatcaagtacccagttgctgggactgaggtcaaaggtttgaacctcatggggctgcttaactccatgccacaacagatttacacaagaaagagaacctgacactagactggaatctgggagacctggctactaactctacctgtgtggccccaagcaagtcctaggacctgtctgggcctcactcagtttcctcattgtaaatcaacaggactagacttgaccttgaaggactcctgcaccgaaagcctttcatcactgttgttgcatccgcactgctgggaaaataacctgatgctgggaaacaagtggtcggcctgggtcccagggagcctcggggactaagagccatcatctctgtcctcagtttctgcaggacagtgttacttcacctttttcctggctgcagtgtttttattcattcagccaatgtttataaatgtttattgttctccatgcctgcctcctgtcttccctgctgactggccatcaggaggcccagatggcaggattagcttggaatggcagaacagtcaagggtcatcctcttgggtttagacccctttaatacctctgctatatgagatgagaagaatttagaacattgatccttccagcagcttagactagacccctgcctttctaagcaggatttgcctgtgggtaccttctatacccttgagatccaaagcaacttactactcaagaaaattaattagcaatgccaagagtgacttgtacagctcccctaaggatagctcaaaacagcagatagactttgatacaatataacaaatttctattattcagatcactgtaggaaacttagcaactctgtgaaggtttcccagattaataacaagtctttattgagcagatactatgtatcaggcattgtgttaggtgttttacttacattcttgttaatccttaaaataacccttttactgcaaagtgaaagtccccattttacagaagaaacatgttcatgtacagaataattccttagcaattatttattgagcacctactaagtgctaagcattatcttgggctctggatatacatcagtatataaaacagacaaaaaagctatttggggggtgggaagggggaccaggtagaggaatagcaagtgcaaaggcaaaagcctgaggcttattaataagtgtgtctaactctaaaacctaggctccctccagctcacagtattgcctctctaatggtcctttgtgactccattataattgggtacttagatgacctagcaattttaagtttatccaatatttatgggatacttattttgtgcaaattgctacgatgagatgaataagttgtaggccctgcctttggaaacatacagtttagaggaacgaacacccgtgtgtataaaaatgaatgaaagaagacttcctctcaaaatccagatcttaccatttcttgcatttttgtcatttgacccttgtaggccagatggtgtggttcctcgttttgtatctgaaggaagagtttcagggagtgggtgggggtaagtgtctgggcaccagggtggccaataaaggatgcagagacacatgatgggctcttcaaggtgggaggaagtagagggtgggatcactgcctggcatgggcagaggatacttcatggacatatacctgtgacacagccaggggagggtgcagatgaaaatacgtccagtgggatggtttctaaggagaagtgtgagggactccactggggctccgtattttgtctggctgaggagggagagatgctgcctctccaggaatctggtaataggcaatgcttgagattggtgtgaaccaacgcatcacatagagccaggagaagtcacgaaggaggcaagaaaaagaaatggctgggctaaagctgtggcagagccctttttatcctcctttgggccctcatatggcttctcttttggtctgaagaatctcatccttcttgagtttagccttctaggtgaaggagtgggcagactgcatgcagggagacagggaggccgtgtttgtgtccttcagctcaggagctgagagaacagaggtcagggcttgggatggagctgaccgttagtgcagatgggaaagtgaagcaatgggtcgggtctgtttgttcctgagcatgtcctgtgacaaaggaagttgcaacatgtctgtctgtctttctctctctttttcttttctcctttcttttcgtttctttctctctctctctcttctttttttctctttctttcttcttcttactttttttttttttttttttaaataaagaaagaagcaggtaaaaccatcttccagaaaatgccagaaagaatatctggtctgtgatgggtggttcttgcccctcccgctgcaatgcttttcctgtgtagtttttcttttgtccttcctttcccatccacactttccactctcctttcctctgagaggttgtgtctctgcagcaggccagctatgtctccaaagggaagtagtcagtgcttggactgagggaaccttgagagagaatcctctcctttgtcctccaggtgagagagctgttgcatccactcacacctggaaggttgctggtctcctctcgctggacactgagagctgtttaaatttgacaggtggttcctgattcccacctggcattttttgctgctgcacaggtctgtgttgtgtcttagaaggctgagggaatacttacttctcaactcagataaccaccttgttggtaggttcagtgtgtgtctgtgtcaaggcagatgctgggaaaaaagggcccagaatgtgagtgggaggtagaaatcaaggctagaagaccacacatgttaatctggagtacttggtcaggtttgattttggcctgtgtgctatagctgggcaagaagccagttgtgtttggaaatgtacagatgatctattttcctgatgaaaccttttgaggtctggaataaacatagcttgctttctctctttccctcttttgagattcaatttctctcccttggacttctataccctagtagagccaaaagttccagtacaaaccagttttgagactccagcattagtcaactaagggatgttgtaggtcatccctgagaacgagggctgcttgctctggggaagctgggaaatggcaccaggtgtcaggccctgctgcccaggatgggatgacagctgctggtgttaattacgtttctgggcagaacagggtaaagtccttgggggtgagagtttttgtttaggcactgtgttccctgtacctgttgcctctggtacagctgctgcagagcccctccttgcctgcagtcttctttgaatttaatctccctgtgatccagtgcatctcttcagactggaggtgagcccagaggagtggtggagggagtggggccagaatttacttgtttgcctggatcccactgagaatacagaagctctctttcacgagaagctgtgctggcctctgtggtacccactggccatatgtgactattaaaattgaaattaagtgttaataacatttaaaattcagttcctcagtagtgccagccacattttaagtgctcagtggttagctagtggccacggttttatgtggcacagatagagaacattttatcatcacagaatagtctcttagacaatgcaagattctgagataatttttctaatcctggtagacacttagctggaaggggatttgaggaagggtacagggagaggttttgaagcccaggtgagagggcaagtagaaggtattcatttagaaaaggatcttaaaaagtatttagtttgtagggccaggtgcagtggctcatacctataatcccagcagttcatgaggctgaggcaggcaaattgcttgagcccaggagttcgagaccagcctgagcaacatggggaaacactgtctctacaaaaaatacaaaaattagcctggcgtggtggcgtacacacatggttcgatctactcaggaggctgaggtgggaggatcacttgagcctgggaggccaaggctgcagagagccgttattgcactgcactccaacctgggcaacagaatgagaccctgtctctaaaaaaaaaaaaaaaaaaaaaaaaagaggagttcaccttgttgaggactacatcctaagagatggtcacctggcccagtggctcccaaaccaggatgattgttagactcacttgtgggtagcatttcaagatacagattcctgggcaccactctttgtgtctagttgaatccaagactcttcagaggaggtaacctggaatgtgcatttttaatgtgctccccaagtgataattatctgggtttggcaaccaccaacctatcatacctgtgcttaaattcttccaatggtaaggagcttatcccttttcaagaaaaccttaccattaaggaaaaattcgctgttgttaaagttctatgtttttcgaatcttgagatttggttctttgaggtcatgaaatcctttggtgctcattgcatctttagagcctcgcagaaccgtcatcttcatccttgcactcagtcttcagcagatatttgagggcagctgtggtgtggtccctgccactccaagtcatggcatgcgtcagagtgcttgatctgccaagggctctagggagatgcagagatgcaacatcattccaggatccttccaattgtcaggccttgctgagagccagaggaaaggtctgaatctcagtggagccctacagggacagcccaagggccatccagccggtgagggccatgtgtgtgtctgcctctctgcatcctgctccgtagggaagagtccctgcttctttgcatgttagcacttgttaacaccgacctggttttcttcagagacattgagagattcagccatccattcccggtaatgacagatgtcatttctgtttagagaccttcagtagcctcccttcacttccagtgtaaaattcaaactcctgaacgtggcattcaagcaagctggtttgtcctgccttccacactttgccttccaggagagcactccttcccgctctgccttgcatttatctgcttccacatcttctcttggatcttacatttgcttatcttcagttttttctggtagaactgtatttatccttcaaggctcataatagattttacccccttactcccctgcccaattccaggcagaactgcctccctcctctgccctagtgagggttcattctgcctgcatgactgctatgcactcaaattacagccccctgccaggccctccctgctagaccaagctccttgcggacaagaactatgtcttacttggcttgatatccccaagtgcaagcaagcaccagtgctggagcctccttttcctgcattggcattcttaccctcagtggcccagagctcatcagctccaatgagaaaagtgctacttagcagctgataattaacagacaggacgtgaggtttggctacttcagaggcaaaactggtatttaaacaataaggtttttaaaaatcaagcattaaagtgtcagcttcagaagcagctacttccaaacataatcctgcccagttagagaagacaaatggaataatgagtggaaccaaagatttctctctagccttgagaagagttcaggggaaagaggcctgggtggcgtattggcaggagattggaaaaggggccttcatatttcttttctgtggaatggagctggggctgcttggagagcaggtgggaggtgcttccttagaaagggctgtctgtgttctcttccattcccaatttctatagattggactagttttgccaagtgagcaagcaagaaaaattgggaaacagagggtaggcatcaaccctggcatttatcctaaggtgatgcagcacacacttgtattcagcgatagagacttttccgtaatgcctggtaatatctcattgtattttcttttgatgctcctgggggcaggaggggagagctgacatcagagcctcctcccttctagatcacaaccagagcatgaggaattccccagccccttgaggtacccagacactaaccacaatctccatctctgctgaaggcgttgtaagaaacatgcaggccaggaacagtcagtggcttcagagcaggggcagcctgctaaagaggcagaggcttcttgtgagggcggggagcttgagagtgccctgcaccccatcctgggggaggtgagcatctgcttctgggttcagctgcctgcggaagtcagtgggagacaccctttcagggtctgcttcattatgaatgaagcaaaaagcctatcccaggaaatcacagaggctgatgggtataccccagggtacacaggctatatttttccaatccaaagtgagggtctatctgatagtttttcctggagttggggaggggtcctactttcagatccaaaagaaaatctgagatatgtcatttgaatatgaacgcactagactttctgggaaatgttgaagatttacgcctgtctgagtgtctctcactcgttgttacctgtccatttgttacctggcccacggatggaggaggtcggatggggtctcccagggtccccttgctgggcacgcttggcaggcatcctgcttttcctttcaggttgctggaattagtggtggtggtggctcagctcacccagaccatgtgtgatggttatggtggtgacttctcactgactgctgatgtgtacagtacattgaaagcagtcacccaacttcctttatagccggatacaaaacagtgcctgaggtccagggtcggggaggacttgatgagggaataaaaccagccggctcatctaggggctgatatctgtccgtggtgacataagcacacatgatctgcagtcaaggttgacttgagggtgtgcatgggttcagtcccttttatgaagtctaatggtccttccagaagcttcatcatcatttgaactgaataagtgaagatgagtgcaccacaagtgtgtgtgtgcacttcttaatctgtccattcatctgttcactgcaggcttattgagggagaaacatgtaagcaaggtatttcttgtgtactccaagtggtaggagagctatgttcagggaactgggtgaacttggaagaaggagccgcccgtttctccaagtgcagcgccagtcccgagacactctgtgatcatctaaactggggaacagtctgcaatgcacattactgaattaaaagctctgagaagttctacagtgaaagaatctgtttaactttgtttaacctggtgcttctgccatctatatgacccctttttacttagcacttattaacatcctacggaatactatttgagaaatggcaacagccccccttctctgggagaactgttcagtgattcagagcaaaagtcacctgactctgggtcagcacaagttggagaggtttgaaaaaggtgtatgtatgtttgcatgtgtatgtacggtgggttggggggaggggtgtggcagaggaggggccccggcaggtggcttctattgaaatcagctctgtctgcctccctgttggctttgtgcttctggagaagcttttgtcctggcatgaaaacactgaatagcagctgcatctgtcatgcctgggaagcagcaatgtgcagcatggggttgcatgagtagacactcctgctggagggccaggctgccgagagtgcctgggtattggacaagggagaggctggtgattctgaggcagctgcttgctaatcctggaagcagaggggaacaagatttagctcccttatctctctgccttctcctttccgatgggtgcaattgtgttgactcttgagggacagccaggaagaagcaggtgggctggatgctttctcctttctccaccaacccaagggcatctggagggtggaccagggcagaaaggcgattagctctccgttacccagggagctgagacaaaggcattttgggttaaattcaaggaggaattcagaattgtgaactggatttatggaagtttttggagtttgaaaattcgagagtcctggctggacttgtgcttggaacgttggtcggaggtggatatgaatgatgggtcctgcagatggccgactcctgagaaatgactgggaggctttactggatttttcgcttggaacaaacccaggcttagggaattcccggagcctgttgcaggcctcaacacccttctggtgcagcttcgctgtgaggcagtggttatttctcaggaaactggcaactgggagtaaatgggagtgtggggtgggaatcagctactcttcctgaggattatacacttccagtgtaattaaggcggggtcaggatttcctatctcttatttatttatttatttatttatttatttatttatttatttatttgcttaatcttaaaaggctgcttttcccctcctggtcttcccacagggacaggagttagtctgttcccagaaggagctaggggaggtgtccttcatctcccattccttcttgccctctccctgcctttccctggccacagccacagagacccagagtcactcagatgggggaggagcaaagccagtccctctgatcattgcctctttgttagtggagaaagggcagatgctgctctgcagttatcccgaccaccctgcaggacgtctgggtgggccgggctttggtttgggaatcgggagtattagctgcagctgccaactgggcttgtacttgcagactcccaggctccaggctctctggaggggaccagcagctctgacccccgtgggcttgctgtggtccccagggagcaagcccttgccaagaacctctgagctcaccgaggcgggtatggggtaaggatggagaaggcctggggagcagaagtgtgcagatgactccctccttcccctcagctgggtatgcatcaccgctgctgggaagacgttcaggccacttctagacaaatcggtcatgatggaaattttttcttgcccgtgggtggggctttacttgttcagaagtggcttcagatgtgctctttctaggtcctggcttgagtgctgagcatttacctgcagcccctcggggctagaaggcagggcagtgtctgagccccttccctaccccttggggctagaaggcagggcagtgtctgagccccttccctacccctcattcattctctcccctcacctgtcattccatccgtcagccccgaacagcttggcagccttgcggctccagctggagcttagtaggcatgtagttggaggagggaacggcactgcagccgcgctcttctctctcccacaggtcttcttcttgttgggcctccacttcctgtcagggccctgcttgcagctgtggcacatctggacctagacggggtatcctgttgtcctgcatgatgaggatcccagatttcccctaggtgatgaccacagtcattccagggtgggagcaggacttcccccacccccaggcactccagagacttcctccaggcccccactaagtagtctgttcccaactccatctctcccccatggagaatggtgggaaggaagttctgccagaggttgtttttggtttgtgaggtaatagactttggtttgagaaacatacatctctccctcttctttaagatgtgaagccagaagcaccagactctggtttccttggaaaccagagcagcaaaggtagagaaaaaaggggctggttgtaggcactgaaattggggaggattctctggatcccagcacttttctggggaatccacatggtctgccctgggccctgggttgtagccctcactgtgttaatggactgtgtaaccttggtaaaatgcctgcaactctctgcaccttagtttccgccaagatgcctaaggtggggaacatgttggctccactcagattctgtgccccagagacctgctgggtgtgtgtgggggtttgggggtagggcatggggctcctgctcactgatttagcatttgctgtggctaaactacaaagtggacagtccacatggagacagttgagagctacttgcacccaggtcctttctttgagaatacagtgatgtaacaggagacttcttgcattttgcctatgtgaaaccagctggattttgctgaagctgtaattgtgtctctacattctttgattcctgtctaaaaaaaatggtttccacaaatgctgtgaagaatagactgacagagctggaaagcgttaagtagggatcctttaaacagatccctacattgtacattgatcccttcaaccacagccagagaggggcagggacttacttgctctgatcacacagtcagaacaagaactaacaacagtaaaggtctgggtagcagcctcacatatgctaagattccctgttggctaagtttgtctgttcccaggtcaccctggccttttgcaattctgccctccgcaggcccctgtgttggctgaaaccagccctcttcttccccttgcgctttcctcctgtgacctcccagccacctcttgtttcccctgtggtgttccccacctgttgttacttcctattcctcctcacaactttttattatgaaacatttcagatgtgcagcaaactggaaagaattgtacagtgaacatgattataccaaaccacctagattcaaccattagccttttactatgtttactttatcatgtctctacgtgtttcaatctctctatccattgaccagtccatcttattttggggatgcattttgtagtaaattgcagacatcaatgtactttacccctaaacatctcagcatacataggcattaatttgagttcaatatttgttcatgcatttttttgatgataatatttatattaacagtgaaaaatgcacaactcttaaggtatcacctgataagctttgataaatgcctctatctgtgcaacccaaacctctgtcaactatagaacaaaaagttttattacctaattaattccctcgtgttgtttcccaatcatcccaacacataccccctcgcaagtgatcacagttctgatgttttctcactgtagattagttttgctttttctggaacctcatataaatgggataatcagtatgaactctcccttttgtgtgaatttcatctgcatggtgacatgtatcagtagtttgttatgctgagcagtattccattgtatagatatgataaaatttgcttctccattcccctgttgatggacatttgggctgtgtccagttttgggctatgatgaataaagctcctgttaacattcttgcacaaatcttgttgtggatgtaatgttttcatttctcctgggtaaacaacgaggagtgtgattgcagagttacaggaggctgttacttattgttcctatctgactctctgccctgccctctcattgtactgtgcacccaattattttaggactgttatcacatccagtccctcagttgctccttcagggtttctcttcttccggcaattcaccctagtttattgaactgttgctcttatgttatgctcctcagatcttttatatcctggttgtcctcctctggaagtataatactcttttacagatgtgttgcccagaactgagttctcgctgctcgatgtgatctacatgtggattctaggtatgggagaaatatagagtgtgggtgcatttggatccctgtcttgagctaggtacttgatctgtgagctgaaggaaatattaactttttggcagccacgtcatggcatcagatcagatgagttaatgtttgtaaaaataccacaaatctaaggtcatattaagatatccattcagcttgaagtcagtccgagcctctgatactaatggcatttattatgaactttctacttgccattgtgtcatttagtttttgcctaccacttggtgagaaaggtactattcaaattagcttaataaaaactccttgatttaaaactagggtacttagctttggcactgttgaccttttggaccagataagcctttgtttgttgtgggggattgtcctgtgctttgtaggagttagcagcatccctggcctctacccacttgatgccagttgcaaccatctatctacccatgcccccaagttatgacaacagaaaatgccttcagacattgccaaacgtcccctggggggcaaattaacaccaggttgagaactattcccaaggtgtagagcttagtcaccgagaaaaaatttaaacaatatagctcttcctgaaaggtaatcactgccagctctttagcatatatacttacagattatgctctttctatggacagtcctcatttttcatggttctaatctgtgtgaatttcagttactatggtttggttaaataacatcagtcctcgaagaatttggctcaaatttgagttgccaggatatatgtattacaagtaactgcatgcagtacaaactttgctgttagctcttcagtccacagatcactatgtacataacagatgctcttcatggtcactgactaatcatgtttcttcttgaagagtcttttggtgattggtcactgcctatctgttcacttcacacgcagacaggaaagtgtgtagttgtgttgcctccctgtctcctagtgagaaactcgtgacattttacaaaaatggacaattgatgagggaattggccaagaaagatgaaatttcaaatgaaatgtggtaatgctggtagtgaatttcaagccaaacgtaatggaattatatagactagatagctgactgtgggaatgtcaacactgtcactgttcaagactacatatacagcctgggaaactcagtgaaggtggcatgtcagcataaatgaggaaagtggtttgatgaaaaggatgaagaggtcccagaggaggtgacactgcagaaggaaacttcacattaaaggcaccttgaagatatttcacaacatcgaaagtgcaaaggataaaacgttagaagcagatccaaacttagaaaggagtatgacaatttgcaaaggcatatgaaagatactcattccatattggatgttaaacaacaagaaggcaagtgctgttcaaattactctggataaggtttttacaaagcaataaaacactcattctcagtgactctaatgttttagagtatacacaataaatagttttactgttttctcatttccttatttataatttgacagcaagagagtttttaatgttttgaccgaaatttttaaatgtcgtggaaaaatcataattttcctcattggtgattagggttgctttgcatggtcatttttatggttccgcattactgtgcaaagcaagagctgcctgtatttacaaaaagtgtgggtgaatacacatgcacacatgcacacaccatgctttttctctttttaaaacattttacaaaatgggatcagactatatgtatcaaattacaacttgcttttttcatggaagttttttttgtttgtttgtttgtttgtttttgagacaccatctctctgtcgcccaggctggagcgcagtggtgctatctcagcccactgcaacctccacctctcggagttcaagtgattctcatgcctcagcctcccaagtagctggtaccacaggtgcgtaccaccacacccagctaatttttgtgtttttaatagagatggggtttcgccatgttggctaggctggtctcgaactcctgacctcaagtgacccacccacctcggcctcccagagtgctgggattacaggtgtgagccactgtgcccagccagaagaatgtatttttgaagaacttttgatttcagtatgtcttaatctacctcattctttttttttttttttttttttatgtttttgagacaggtctcactctgtcccccatgctggagttcagtggtgtgatctctgctcagtgaaacccctgcctcccaggctcaagtgatcctcatgtctcagcttcccaagtagctaggactactggcctgtgccaccacacccagctagttttttctgtattttattcgtagagacagggttttgccatgttgcccaggttggtctcaaactcctgggctcaagtgatccatctgcctcggcctctcaaagtgctgggattacaggtgtgcgtcactgtgcctggccccgttgtctattaacagctgtttagtttatttccttctgtcccctaatttgaaataatgctaaagtgaatatttttgatggatactatcataaactccatttaatcgatgagttcaatggagatttagaatgtgaagtaactggctaaggtcaggcagctactaagctttagagctggtgtttgaacttggggcagtgtaatttcagagcccttgcaatcacaatgctttacaccttctcttccttgttcttagaagcagcttttaacaacgacaacaaataataaaaaaaagatcttactgagtcaggtacaattctaagtgcaattatattgttattattcactaaataacaacctgcgagttagataatgttgttatccctgtattacagtgaaggaaaccggaggtataagaaggttaggaaaggtgctcagggcccacagcagtttaatggaggagctgggactgcccccatgcagcctggcttcagaaccttggctctcattcatgttataaagatgtgactagagaaaagtctctttcatcctgtgctgttgaagatgggttttgttgttgttgttgttgttagttttggcgtatattttctcctactgtaatcttttaaaaatctactacctagcacagactgcctctcccattgttttcttagggggtgtcacttggaagtttgataagcttactgcctactatgtctttagtcagcttgttggtaaaatattaatactaggcaaagccagtctggtgtggtggctcatgcctgctgtaatcccagtattttgggaggccgaggtgggtgaatgacttgaggtcaggagtttgagaccagcctggccaatgtggtgaaaccccatctgtactaaaaatataaaaatttgctgagtgtggtggtgggcgcctgtagtcccagctactcaggaggctgaggcacgagaatctcttggacccgggaggtggagatttcagtgagctgagatcgtgccactgcattccagcctgggcgacagaatgagactccatcacacacacacacacacacacacacacacacacacacacacactaataggtttgccactgaagttgttctttgggtttagtcaacaagtagatacttattgaacacctcctaaatgccatgtaccgggtctaggatttgaaatcaaaagatgaacaagacattgtcccagcttccaagaggtacatggtccacagtgaaaagagaaaccgttttataaatcccactggtgagtgctgaagtaggagtttagcaagagtctgtgggcacagagaggcagaggggctgactctgcctggaagtggtcagagaggcttcacagaggaggtgacattgccatggttcttacagacgtgaagtcatgacaaggcctggcttgcctgaggtcaggaagtgcattgtagcttcaatataggggatgtgttgggaggttagggtagcgatgatgtggataggagctagggaagactaagttagggaatttggattttatcatgtcagccagtggagatgtttaaggaggaaaatgtcctgctcagctttgcctttcagcatgtgacccaagatgtactgggatggagtacgtctcccttctagaaaccagttagaaaacacagaagagtaggccaggcatggtggctcatgcctgtaatcctagtactttcggaggccgaggtggacagatcacttgaggtcaggagattgagaccagcctggccaacatgtgaaaccccgtctctaccaaaaaataaaaagttagccaggcgtggtggtgtatgtctgtagtcccagctagtcaggtgcttgaggtgggagaattgcttgaacccaagaggcggagtttgcagtgagctgaaatcatgccactgcactccagcctgggggacagaatgagaccctgtctcaaaaagagaaagcacacaagagaaaaggggctgcaacccagtaagcgatagcaggactggaaaaggaaagatggatttgggagatcttcccagagacaaaattggattgcttctgtgggtgacggagggagagagtctgaggatgagtactcaagatttatatctgggagcctggctagatagtgatgtcattgccgtttactgagatccgggagcaaattcaaaggggccgtgagttcagtttggtgcctgttcagcagcctgtcctagatccaccaaacagcactttattactggccatttataacaactgcaaatattatctaaatgctttgtcatctcactgcctcctcctttgtcatccctaaggtctgggcaggagactgtgttcatatacttcatagaggtccagaccccttgcgtctggcattcctttggtctataattcagtaaactctgctaaaaaggaaacgagactagcttgctgtggcctcttaagcgacccagggtagcttgtgatggttcagattatgatttgttctagagcttttccagaggcagatgttgaggagtttatcctatttgtccccttccctttaaacaaacaaaagtgccggctggacgcagtggctcatgctggtaatcccagcattttgagaggctgaggcaggcggatcacctgaggtcaggagttcgaaactaagcctggccagcatggtgaaaccctgtctctacttaaaaaaaaaaaaattagttgggtgtggtggtgggagcctataatcccagccactcgggaggctgaggtgggagaattgcttgaatctgggaggtggaggttgcagtgagctgagatcacaccattgcactccagcctgggtagcagagtgaaactcggtcacaaaaaaaaaaaaaaaaagaagtcccaaccccccagttttttatatcctcttagtcatcatagtttattaacagttttgtttacatattgcttctttttccctcttggctagactgtgaaccttgaagccctgtgagcttggtctagtgcctggagcattgtgggtaccaggtttcgagagaatgtgtgctgccagaaagcagatctttgccacctcctctcccctcagctcctgaaccactgccagcagtggttctggaatcaacctgtactttccttctgcatcctgggatgtaattctgggtgattgtaagttggtttatggtctagcttagaattgaggcttctcttgagagagagcatgtgtgtaaatgtttagcttgttctagtctgtggagcattctccttcatagaaaagatgggaaatactggagatgaaaattctccattctctgtcattttgtgtgttagagtctctgtccccatcccagggccacttcctccctggttcttcttatggctttggatgtagcttgaagacatgctcctagcattttcacaagctctgcttgttgtgtttagtgagcgcagactactcccttcgggcctgtcctggctcatgggcagttgctcgtgtctttgcacacatcctttactgtctcagctcttcacttctccctgacatttgtggctgcctcctcctggtttcttctttaagcgattattgtgttttagatgatcagaattcactttttagagacttggaccttgtctttcaaaatgcattcccttttgggatctctgcccatcatactccttggtctcaacatctaaatattggttttttttttctttttctttctttctttttttttttttttgagatagggtctcactctgttgcccaggctgaagtgcagtggtacgatcattggctcactgcagccttgacctcctgggctcagtgatcttcctgcctcagcctcctgagtagctggggccacaggctagtgccaccatgccctgctaattttttaaattattcatagagacggggtctccctgtgttgcccaggctggtcttgaactcctccttctcctttttgtatcctcttagtcatcaagccatcctcctgcctcagcctcccaaagtgctgggatttcagtgtgatccactgcgcctgacctgaatattggtttttttgaagtctaggctaaacaactgtttttgtctcagtttttttttttttaatttccctcctttgaactctgaattgacaagcttacttcctcccaatgtggtgttcttgttattattgtttttgctagctgaagtattttttttttttttaaacataatttactaggtttttcttcctggccagaagtaagttcagggtaatagttcccttccttgtatcttcagctgtgtgagaggtaatgtagagtgagaatttatttatcaggtgccctgctcgtagcagaaggcatgacctcgacttctctctcacagtgaccttgtgtttgtgttggtggcttgaactcactcttgtgtctgggccatttctctcactgtgtaggaaagagtggttcctgtcttctccctggccatgtagtctgctgtgtgtcaccataacaatcatctatcttccggttctttttccttctctcctcacccagttgtctccagtcttaggcgtgtggaattgtgtactgggtgggggatgtgtgtgtgtgggccgccctcttgatttgtaggatccttctcttcctccacattctctgtcaactctcctccaccccctgtgagatctgtggactcaggtatacgttgctgtgagtctcattctgctcagctggggtgatgaaggtgagattgcttttgtcgcttcaaagtaaaattttagatttgctttggcagccgcacagggtcgtatgcatgggggctgcttaggccagaggcgcagtgttcctgacctccttccgtcttactttctcttgctagtttgtccatctctgtggattttttaaagtagatactagatacctagatactactaagaacatgatctttctcttcttgccacttggattttagcttaaagccaacttggaacatttagggtgtttccttcctaccactgtctgcctggtctcctagggaaagatgccttgtatcttgttctggtgtacagtctgcccatttaattggtaagtgtttattgtgactcttctctactgggctctggccccaggcctgatgcgaatagggcaggcctgtgaacagagcaaagacgagtcacttaggaggggacgagagaggccaacggtaaactaatactaccagctcagggtttatttgtcaaagcctcctttgctgtgaataaaaggttagatctgaattgggtctgagtcctggctttattacctactagccatgtggccttgggcaaattattaatacttccttgggccttggttgccgcacctgtacgatggagtcagcaatggatcctgttctgtagggctgctaggaagcttaaatatagcaatatttgctatatataaagtgcacctggtacataattgatgcggttgaaatgaaaattcctctttctctttcagtgccatttgctggaagaaacagaagaaatatctctgtccccatctttcagtttcctacccaagactcctgtgtggttgacatcactgctgtgtgcagtgttcatgtccatataagtcagaagtggcttgcagcagtggtttggggctttggggcctctgctcgctccttatcaattcttagggttacatcctctgggaagatgccaggcctggtcaagtgtggcctctgacctagagttatgcaaggcctctcttcctcctgtggccagtgtgaaatttctcatctgtgctctcctgcctctagcaggaaggttggcctacatttggggcacatctctgtcactgtctcaggccaggggttcaaatataagacctgaatcatactgcacctcagaacccaaacccttttacttaattttttttaaaaaatttcattcagatggtaaaggttcaaacaatacatagagatataaaacagaaagaaaaaaaaatacacgcctctctctagtacctattccccagtagtcaacactgctaccttttttttgcaggggaggtaaattcctccagaaaaaaacttaaacatctacaatttcatatatcctctcccctcttccctaaaaaacaaaacaataacaacaaaactatagaaatgggattatgctatatattctgttcagtacttttttgtttttgaaaatttaaaaaatatgcaaaagaagaaaatgtcatccatattactaccacttataattaaccactaattaacttttaggtgtgtttgcttcttgtctttatgaatatactttaaaagctacttaagtaaggtggaagcagttctgtttaaaaaattaggatgttgcccgggcgctgtggcttacgcctgtaatcccagcactttgggaggccgaggcgggcagatcacgaggtcaggagatcgagcccatcctgaataacatggtgaaaccctgtctctactaaaaaatacaaaaaattagccaggcatggtggtgggcgcctgtagtcccagctacttgggaggctgaggcaggagaatgacgtgaacccgggaggcagagcttgcagtgagccaagatcatgccactgcagctccagcctgggcgacagagcaagactccatctcaaaaaaaaaaaaaaaaaaaaaataggatgttaaagataaagccaaagtattatatcatcttggtccttatctgctttcccatttaatagcatcctgctctccccgtcgccgtggatggggagctgcctctttcttctacgacaccgcacgttttccattgtatggatttgctgtcatttcatttatctgaccaccctcttattggtaggcatttaggttattaccagtttttttgccattaaaatgctttatgaatataatgtgtaggatggtttcttgctgggtaattactgggtccaaggtttgaacatttacaattttgatagacatggccaaatacctccccaaaaatactagtttatttctctaccaactgaatgtgtaagagagtgccttttctccccagatctttgcataaacctgggagttttattttggtcaaacattaaaattttttttttgccagtctggtgaaattatcatcttttttataaacatttctctttgagctacactgagtgtcttccattcagccatctgtgtttctcttgctttgaactgcctgttcttatcgtttggccatttttatattaggttgttgatcttcaacaattgatttgcctgagttaagttagccttttatccatcatgtgttggaaatattttaaagatttgtcatctacagtgcgatttttaggcctcttgactttttgttgagccctaggcttttgtgactgcctgtgacagctctggagagggggccgacaggcacagtggcccgcagtcgagccaggccccatcttctgggcagtgacgcgtggttgttttaaggcttttggtactgggattccccgttgtaagttttagctttgttttgggtagggacttttccccatcatattaatgaacattaataacaaatagagacttgcttttgcctcccaaccaaatgtttgggaatgtgtgcacccacgtgaagggtctgtgtgatatctttatctcatcaaccttctaaggcttttaaaacctgttgttagatttatgtttagatcatggttctaggggagaaccatcgtcactcctcattgagctttgcagaggctctgaaaggaggacatactctcttccccaatcaatgtagaggaacgtcagtagttcagccaagattgctctatctgccacctcttatgcttccaagctgggctaattgagaagtgtgacatcttgctccagcctataagcagctgtctgtaattttgagagatgagaaggattctcccttaaaccattgctgcttttgtggcagcatcttatttctttcctttgcagcacaaatcacagtgtataattaaaactattttctttgagcttgtttttggtgtacctcctgcactaaaatgttaagttctgtggcggtcacggggcttatttgtcatgttctctattatacccttggcatcctctaaaccagtgtgtggcacatgctaggcactccggggtttcactgagtgatccattctgttaggatgggatcaagtgctcatgtgtctcctcctgtgtccctctctggctccagatcttccacctggcagagtttccggaagccccagagatatgctccatggccatagggcctgagacgtggatggctgccctctgactaaaatttagagagctaagcttgtctctttaaaaagtaacatatactaattgtaaatcacctagaaaatacagacataataaaggaaattaaatctgtgattctgtctttcagagatcattaccattaacaactcattgagtcttaatgcctttattgtttttgttttgttttgttttgttttgtttttgagacagagtctcactctgttgcccaggctggagtgcaggctcactacaacctccgcttcctgggttcaagtgattttcccacctcagcctcccaagtagctgggattgcttacaggtgcgtgccaccatgcctggctaatttttttgtattttttgatagagacaggctttcagcatgttggccaggctggtcatgaacttctgacttcaagtaatctgccccccttggcctcccaaagtgctggggttatagatgtgagccactatggccagcccctatgcctttattttttttatatacagatccaataaatatccatagagcactgagtttatgctgtacataagggtttgtaactttcagttaccatcagacatgttttgataatgaaatttaaagaaagtacacattgggatttgggatgcagaagaaaaaataggatagtattctagacaatgacagtgatgatacctgagaatctagtagacactcaggaatccacatttccccatttaatattcatctgaaacaccatttcagtggctgtagattgtgtagctaaactcacttttacataaaacaacctctgttacttatctctgggccttaagtttgtgatatagtttggatgtttgtttctcccaaatctcatgttgaagtgtaatccccagtgtgggaggtggggcctggtgggaggtgtttgggccatgggggtaggtccctcgtgaatggcttggtgctgttcttaagatagtgagttcttaggagatctggttgtttaaaagtgggtggcaccccacccctgttgctcctgctcttgccatgtgacatccctgctcccccttcaccttccaccatgattgtaagcttcctgaggcctcaccaaaagcagatactagtgccaagcttgtaccagctgcagaactataagccagttatatcttttctttacagattacccagtctcaggtatttcttaatagcaatgcaaagtagactaataagtttgttagctatttctagtaaaggtaaataactcttgagatgtatattttcttaaagatacgtctatgattaatacctgaggatgaaattctaaaagtagaattttaacatcaaagggtttgcactttaaggcattttcagcctccatttctggctgttgctgttgtggacagtcttgggcagattttgaactctttgccttactgtggggtggtggaaaggaggctttaggagcagccagagcagggttcaaactccagccctgccagggacaactggccaaaaggtcgtgaactaatgactcagtgagttttctcatttataaaataggatgtttcctcccagggtgggggtgaagtgggtgagatgacccatttgaagcacagtggacccttgaacaatgcaaaggttgggcagtcaattcacataaaacttttgatctgagttgggcagatcacctgagattaggagtttgagaccagcgtgaccaacatggagaaaccctgtctctactaaaaatacaaaattagccgggcatggtggcacacgcctgtaatcccagctactcgggaggcagaggcaggagaatcacttgaacccgggaggtggaggttgcggtgagccgagatcgcaccattgcactccagcctgggtaatgagagtgaaactctatttcaaaaaaaaaaaaaggccaggcacggtggctcatgcctgtaatcccagcactttgggaggccgaggcgggcggatcacgaggtcaggagatcgagaccatcctggctaacacggtgaaaccccgtccctactaaaaatagaaaaaattagccaggcgtggtggtgggcacctatggtcccagctactcgggaagctgaggcaggagaatggcgtgaacccgggaagcggagcttgcagtgagcggagatcgtgccactgcactccagcctgggcaacagggcgagactctgtctcaaaaacaaaaacaaaaacaaaaaaaaacaaagaaacaaaagaaaacttttgattcccctagaactactattaaataatagcctactgttgacccgaagccttactgattacatagttgattaacacatattttgtctgttgcgtgtattatatctttattcttgaataaaataagctaaagaaaataagcatcgttaagaaaatcactttgagtaggctgaggaagaggaggaggaagaggaagggttggtcttgctgctgcagggctggcagaagtggaagaaaatccctgtataaatggatccacgcagttcaaacctgggttgttcaagggccaacagtacttagcagccatttagcacagagcactgccagcccccctcggcctgcagcctgctccagcaccttgctaagaggttgctgaggctcacctgcagcagctgccctcccgagtcctctttcctttacacccctcagagcacccgggccagccatcctccatgtggtgcagcagaggcgccggtggtccgggaaccagagtgggtggccctggcctggaggcacggtgggttagtgtgtgacacacgtggctttcccccgacccccagctgcctcctgggagtgaagaggaggtcttgtttgccaacacataccgcaccacacacccacaacacacttggtgccagaatcagccttttgcatcgctcttggcgctgaatcagagtctgtcttggggagggatgtcttccttctctcattacatgcgcccagcttaggtggtgtagtgagggagtgtacagggctgggatgccacagcctgctttcctccccgtgtcctggggtcccccgtctgtccagtgcccagagctattaataacaccttcattgaaatgggtgtaatggaatcccagttgcccaccccagtgggactccaacacatggggagtggggagcagaataataatagcaaacacggatgcagtacttattacgtgccaagcgttattcttagttatttacatcatgcacatctattaactcatcttgtatagcaagcccatgaggtggggactattactgtcctattaatgggtaagggaaccaaggcacaaaggggttggaaacttttcccagttcacatagctagtgagcagtggcgcttgtgaaggggttcctcctgagggcctggggcctgctccttcccagtcttgtcttcatgtccaccttgctgacgagtggcacatcaggccctgggtgccggctgctttcctgtcctctggctcagccaggcttctaatgctgaccactcctgagtctttccacgtggctccacaatggcagacttgcaggaggagatgaggggaaccatgcataccttgaatagggggaggggtcctgtccttcttcccctcaggtgctggaagagacagagaggcatgggactgtatttaggcagctcccgcagctccctcactgccgctgtcctagagcttccttcccaggcaatgcgctctgtggcttgggcccctgcccctgccacagttggcagggggccttgcctgtggcgttgcagctgagcacacgcaatcattaaccttttctacgtgtaagagaatttcaggcacaaactgtggggctgaggtgagtcacaatgttggaccggggcttagtttgggcttaaaatatttcacaattcctccaggcattctttgactaatgatctatggctttttagtgggaagacccttccttcttctagtctccagtcctcagagcatggttcagggcctgttggccttcactgcccatggccatgcccatgcccaaggagcaggggccttggcttctgggtggacctgccgcctcgctctgctggtggcctctggcagtgccctaggagtcctgctttccttccctgtctcttctttggcttggagtgcaggccacctcccctgctgttctttacttagccctgtactccagattagcacattcttggtttcctctctccaggccttctgcgctccacacttgtccacagagccactttggcacttcagggctgtgcccccaggacgtcagccagcctgcctcgcccatctgaagggctttcattgcttgggttgattttcttatccagtcagggatttctgataaacatgtgcctggatggatgtcaatgaccagtcctttttttttttttttttgttaaatttaatttaagttctggaatacaaatgcaggatgtgcaatgaccagtcttcatgggaaattcttgctaagtttctctaagaaatttaaaatactaccttttccaatttatttcaggatggaaaggacagctcaccctcagtcactgggggagagagtttagtagggagaagaagcaacagaatgagggggtgttagctcagaagttcctaaccactaggtgagggaaggaagaggggagggagtaaacagaaatcaaattagatcttgcccattagaaactcagttaggttgggcagataaggcataaatatgcaaaatggtaaattttttcaaagtggaaactaccctatatagagtttctgaagcaccttcaaggatattatttcacgaagttgaatctaattttacagatgaggaaaccctttccagaaagataggtgggcttgcatgacacaagctaggaagtgcagaactgggattcaaaatgcatgcgattgcaaagcctaggttcactgtgctacatccgtctcctctaatgggtagagagtttgtgcaagtctggaagtgtgatgtgaacctagcccttcttgcacaaactctcctttgccttgtgccacgcactcctaacgtgttcagggcagaaagtgcggaagttgcagtgagcgcttggaattcagggggtgctaaggagcatgcatttagatttggatcttggtgcatcctcacttagcacagctctggttggcagatgtcctggtggtcgtcactgggctgaagacagaaacccagcctacaatcttggtgataacttgtgctggttacatccacatgctccaagctcaactcagtggtgacggaggaacccccctgtactgtggcattaatggtactggttgacagtgatgaatgcctttctgataataaagcacttttagaggtattatttcattagatgctcataatgtttctatgagggggaggctaggcaggtatcatcgctcctaaatgcatgtggcacaggctctgaaaggtagacctctctgtgaggctgtgcaagaagaaattgacaaatttcagactgggccaagtcttccctgattgtaactctacaaccaggcattgcttctgagtaagtctgacaactttgattcttctcctctgggctccagttcctgtgtgcctgtagggggcgatcgaggttctttctgcttggctgctctggaaaccttgttcctcctgaaccctttgaatttagcactcttacagcatgtaatctcactggattttaaggattttctgtgtctcccctcatatcttcttctgccccccactagcctaggcttttccagatcaggactgctctatttggttttgacattcagtgcaatgcatggcccatagtaggagctcagtaaatgcttgctggattgaattatatacaaaggaaattggccagtgccttctcttgctccccttagagcatgggaaagtaaacttttttcctggtacatccaaatgaatgaagttgaaggctgggcatggtggctcacacctgtaatcccagcacattgggaggccaaggtggggtatcacttgagaccaggagttcgagaccagcctggccaacatggcgaaacccggtctctactaaaaataccaaaaaattagccagacgtggtggctcacacctgtaatcccagctactcaggaggctgaagtgggagaattgtttgaacccgggaggcggaggttacagtgagccaagattgtgccactgcactccagcctgggcaacagagcgagaccctgtctcagaaacaaacaaaccctaatgaagttgaaagtggcagaactcaagacccatgaggtgtcctcatatggccacaaggtggcagtgtgacctcctgggaaccttgcctcctgcaactattggctccggccacctgttactccatgggagagaccgagttatctagtcattgattccttctagtcacctgtttggggaattgcctctgcaaagtcagtctgagaaatcttggcttccagcctcctctaaaagctgggtggtgtggtggaaagacttggtctttggagtctaccaggcctggattccaaccttggctctgccttttctcagaaacttagccttgggcatgctacttctctgagcctcagcttccccatcctgtaaaatggcaaatgtacagttaggaaaaacccaacatatcatgggccatagcataaatgtatgccagcattcttgttggaaatgctcatttgtccttcccttccctctgcaagctggctccatcatggccatctgatcttatttgcaagcttcagacactttccagcaggttcttaggcctccctgctgtatcaccccagctccactccatctcggtcagtcagcacctgcttcccacgtttccctctgccttcatgccttccctctgcctgtccatttccttcccagcatgtctcttggacaccccagccctctgaatgtccaaagcagttggagtgtggactgtgtagggctcatcttgacttcccatgaagatgctaaatctgtgagtgtccttgtcttaattattttggcacctgcgcttgcacttagacaattggtgataaaaatgacagctattagtgagtgcatgtcagatacgctgtgaggtgctttgtggaaatatttcatttaatcctcacaacaaatctgtgaaacagaagccattatccatccccactttacaaaggaagggtagatcaggatgcttttggctccaagcaatagacaatttcatgaaaagcagcttaaacagtaagaagagtttattatcttgtcaaaaagaagtactgagggatccctggtgatggcagcgaggatccaggtgattgccatttctcctggttgccttcctcagtgcattggtttatcctcttaggccccccttactggtaataatgtgactgtcatggtcccaggtgccatatgcaggagagatgatgtacatttcttgtgctccctttaagaagcctcttagcagatttcttttttttttgagatggagtctcgctctgttgcccaggctggagtgcagtggcgtgatctcggctcgctgcaagctccacctctcagggttcacgccattctcctgcctcagcctcctgagtagctggggctacagtcgcctgccaccatgcctggctaattttttttgtattgttagtagggacggggtttcaccgtgttagccaggatggtcttgatctcctgacctcgtgatctgcctgcctcggcctcccaaagtgctgggattacaggcacgagccaccgtgcccggcagcagatttcttacaaggctcttggccagttgagttgtaggcttgttcccaagccagtcactagcaaagggactggaattaatgagactggcttagacaggtcaagattgaacccgtgaggctggtgagaagccagcctcctttaatacccctagccaattggtccagggagaagaaggggcatcagtgaggttcgacgagttaagtaacttgctcaagcttggaaatctagtaataactggattcatactggcatccggctgacttccaaggccatctgttgccaggttgaagtcaactacagaggtagagagaatattgctctggatttgttgtgctgggtctgagtaattgctgaggggccttttcctatggactctggagtctctcttctctctagccccctttccaatactgtattggtttttctcagtctgcctttctccccgaagccccttcaccccctgcttcccagtacctgagtgctgcctgccttccacagtagactttatggcctaagctggagacaggtctaagctggaccgaatggcctgagggctgatctcagtgtagctgtcaaggccccaagagagtcatcatgagatttcatatagagcagataaggaactgcagaggcctcaggaaatgtgccaagggggctggtggggggggccagcaggagtggggggtttgtggtatgtcggtggcgatgtcagggcatgtgggccaggggcttagagcaggcccatgtgacagcgcagttactcagaaagctgtttggcctgcagatgcttcaggactgccccaaggcccgcagggaggtggagctgcactggcgggcctcccagtgcccgcacatcgtacggatcgtggatgtgtacgagaatctgtacgcagggaggaagtgcctgctgattgtcatggaatggtaagcagccactgttctagtcccggcccagcctgttcccactcctcactcaggcaccttaccctctgaggacagcccagggatgggcctgaagcctggaatgtaaacacttgattttttggggggcagtggagagtggcggcgggctgttgtgttctctggatctcactgtggcttcatttcagtttggacggtggagaactctttagccgaatccaggatcgaggagaccaggcattcacagaaagaggtagaaagggtctgttgtgggagcacgtgcaggcaggcagggcagtgggggtctgaagggggcctttgcagtgcctgctcttggggaagggtgctgaggctgctgccccctccagcatgctgcaaggggtgcctcagctgaccagggaagctcctggtggctttgtttctggggtgggtggtggctgtggggagcctcaggctgcacagaggtgggacccggtgcactgggttttcaagcctaatgatgtgtctttgtgactttctttcccactcactcttccctcccctctacagaagcatccgaaatcatgaagagcatcggtgaggccatccagtatctgcattcaatcaacattgcccatcgggatgtcaaggtgccagctgttcataaccctgagcccgagtgctgtggggggcaacaaaggggctgtggccaccccagagatggttgccaggccaccctgcgtccttgctgcctggttcctgagcatgccattctctgccttgtagggccttgccctctctgcccatgggcaaacccctaaacccagtagtgaagcattctctggccccactcagccctgtggttctcctcaggcagaacccctcagtcacactcttggtttctctgttcctgtggtgtttactgcgggttctgtgtgtcagtctgttatctccaggcactctggaaaccctgcagaggcaggcacctgcccatagagagctgccactcctcgtggtgggcagtgcccaggataggcaaatggttgctggatgagtagaggaagggaggaaccaggatccttttcgtttctgatagcccctcccaggtccagcagggttgctatttttctgtctctctttctgtagcctgagaatctcttatacacctccaaaaggcccaacgccatcctgaaactcactgactttggctttgccaaggaaaccaccagccacaactctttgaccactccttgttatacaccgtactatgtgggtaagtccacagggggcccagggacctaggcttttcccagaacttttctcagcccctcctcttggctatctggggggccgcaaatcctaggagagttgtgtctgtatggccccttctggtgctggttctgctgggacctgctgagaagtagggcttgtcagagcgaagctacagttgagaaattgtaggaaaggatctgctgggatctttctgagaagagccatggtttccatcagattctccatggagtctggacccaggtcttgttctggagccacagctgattggcatggaagaagctttcaaagcatgttcagagcatctgtgaaattaaatgaacggcatgggcctgaaagtctcatgcagttcaggatttttagaatcttaagctcctagttccaggttcctcatggaggaggatgttctgttccagtccctgggctgggctttggctcttccttctgtgccccaactgctgccacctcatgataggctgaaaggttgggatggggagcatctttcacagagaaactgagtggatcacagggttctgagggccggcccacccatgttgacctttgatttgcagctccagaagtgctgggtccagagaagtatgacaagtcctgtgacatgtggtccctgggtgtcatcatgtacatcctgtgagtgtgctggggagggggctgggtggggcagggagtcagggcggcctgtacttctccaggacaagaggaagaggcagacgttagcattcccctttgtacaggggagtcccctgcgtgccccttctctcagttccgatagctaagtggcgggtgtaaaccagctcatgggctggaaagtgtgcgccttagatacttgctatgctggattcccgggccccgggcttgactttgtatattgtgcctgtgtcaataagccctgatttctctgtgacctttacaaggagaagagcctgtttctcatcctgttcctggtacagggccactaagtgacagctgttctgtctcccacttccttcctcctgttgatgcaggctgtgtgggtatccccccttctactccaaccacggccttgccatctctccgggcatgaagactcgcatccgaatgggccagtatgaatttcccaacccagaatggtcagaagtatcagaggaaggtaagaacccaggctttcaggacaaggggaagagcccgtgtgtgtgtgtgtgtgtgtatgtgtgtacacgcagacacatgtatgggcctccatctcatgtgcgtggtgtaactgtgggttagcacctatgcccacgcctgcggggtgcgtcctgcttcattttgcctgtgtggagggctggaggcagggccaaggctgtggggctgtgcagggcctctcaagtggtacagccgtaatggtccttggggccagttgctccggcagcctgcctccatgcaccccctctttgaacctggtttccccatgaaaactggggaaaggagcaggccagggagagtgacccctgagctgtcactgccccctgtcccaccccacagtgaagatgctcattcggaatctgctgaaaacagagcccacccagagaatgaccatcaccgagtttatgaaccacccttggatcatggtaagctcggcaggctggggagccttgggtctcacgggactattccacaggacagagtcttagccaggaccctaccccaggctttcactcggaccccttttctctcttctcagcaatcaacaaaggtccctcaaaccccactgcacaccagccgggtcctgaaggaggacaaggagcggtgggaggatgtcaaggtgaggggcaccactgggtgagaggggctccaggtggggtgggcggcttgcggggagtgcccaggtgtgaggcgtggtgctggtaggggagagcttgattctgcctctctcatcccaggggtgtcttcatgacaagaacagcgaccaggccacttggctgaccaggttgtgagcagaggattctgtgttcctgtccaaactcagtgctgtttcttagaatccttttattccctgggtctctaatgggaccttaaagaccatctggtatcatcttctcattttgcagaagagaaactgaggcccagaggcggagggcagtctgctcaaggtcacgcagctggtgactggttggggcagaccggacccaggtttcctgactcctggcccaagtctcttcctcctatcctgcgggatcactggggggctctcagggaacagcagcagtgccatagccaggctctctgctgcccagcgctggggtgaggctgccgttgtcagcgtggaccactaaccagcccgtcttctctctctgctcccacccctgccgccctcaccctgcccttgttgtctctgtctctcacgtctctcttctgctgtctctcctacctgtcttctggctctctctgtacccttcctggtgctgccgtgcccccaggaggagatgaccagtgccttggccacaatgcgcgttgactacgagcagatcaagataaaaaagattgaagatgcatccaaccctctgctgctgaagaggcggaagaaagctcgggccctggaggctgcggctctggcccactgagccaccgcgccctcctgcccacgggaggacaagcaataactctctacaggaatatattttttaaacgaagagacagaactgtccacatctgcctcctctcctcctcagctgcatggagcctggaactgcatcagtgactgaattctgccttggttctggccaccccagagtgggagaggctgggaggttgggaggctgtggagagaagtgagcaaggtgctcttgaacctgtgctcattttgcaattttatcagtaatttgacttagagtttttacgaaacctcttttgttgtccttgccccactcctctccaccagacgccttcctctctggatactgcaaaggcttgtggtttgttagagggtatttgtggaaactgtcatagggattgtccctgtgttgtcccatctgccctccctgtttctccacaacagcctggggttgtccccgctggctcacgcgttctgggagctcaaggccaccttggaggaggatgccacgcacttcctctctcggagccctcagacatctccagtgtgccagacaaataggagtgagtgtatgtgtgtgtgtgtgtgtgtgtgtgtgcacacgtgtgtatgagtgcgcagatctgtgcctgggatcgtgcatttgaggggccaggggcaggcagggctgcagagggagacggccctgctggggcttaggaaccttctcccttcttgggtctgccctgcccatactgagcctgccaaagtgcctgggaagcccacccagattctgaaacaggccctctgtggcctgtctctattagctgggttccgggaggcagagaggagtgaccgggcactggcactgcgatcaggaagactggacccccagcccccagggcccccctccccccacttagtgctggtcctaggtcctctgaggcactcatctactgaatgacctctctacttccccttcttgccattattaacccatttttgtttattttccttaaatttttagccatttctccatgggccaccgcccagctcatgtaggtgagcctgggcagcttctgttggcagagcttttgcatttcctgtgtttgtcctgggttctggggcatcagccagctaccccttgtgggcaaaggcagggccacttttgaagtcttccctcagatttccattgtgtggcctggtgggtcagggggagtctttgcaccaaagatgtcctgactttgcccccttgcccatcagccatttgccatcaccccaaacaactcagcttcggggccggtgaggggaggggcctcccccagcacagatgaggagcagctggggtaggctgtctgtgccatggccccccactcccccttcccttggagggagaggtggcaggaatacttcacctttcctctccctcaggggcaggtggtggaggggcgcccagggtcgtctttgtgtatgggggaaggcgctgggtgcctgcagcgcctcccttgtctcagatggtgtgtccagcactcgattgttgtaaactgttgttttgtatgagcgaaattgtctttactaaacagatttaatagttgagagtttttctttctctttcttcctggggctcaggccttaccccccaccgcctctatgtgcagaggggttttgttgggtggtgagggtgtgggttgggggtcctgggagaggagcggagggcctcctgggcgagcaggagccagcacctcattggtgaggacctgggcaggatgtgtgtagggcatccttaaagcaggacagggaggctgcaagggctcaagcccatcttcttttgccaaatgcagaatcaggagccaagctctttttggcatatgattctttgacctacatagccaccaccaggtgctggcacctttagcctgcgaaagccagctggtatagggtccagggaagagggggtgctggtgaatttggttgaaatcctggtaaagataccaggggagcaggttagtgtagtaccggcactctccaggaggcggtgataggggtcaggcagaaaccaaaggctctacctcggagctagaagagacttcatggttcctgtggcccattctcagtgcacagatgagaagactgaagcccagagctggggccacatgatgacttgacccgcagcagagcctaaagtagaaactgggctacctgccccattgcagtccctccgggtcagatgggaaaatagcacatccttcactgtgtcacccgcattttcttatgtgaccctcagagctgccagcaagagacagtacagggcggctgctgattgctgttttatgtgtgaggaaagtgactgagaaggtgggatgatgtgccacagttgcatggtgggattggaactcagatccctctccccgctggaggagagacctgcttgtcccctttgctgccagaaggaccatgtctccaccctcagctcctgggaacagcaggccctggacctccccttcatgacagtgggttgctgaggttggttctcgccttgagacactactcatcactctaaaatcacagctcaaaacaaaccagcatgggggtttgctttcagagaaatccacttattttgtctgcacttatgaaggtgttagaagcaataacccaagaaggaggaataaggggtgctaggagggagtcagggagagaaggagaggaagttgtcagagttctgctatctttagaagctgttattagtttcctgttaacaaagcttctgccatattaattttatggcttaaaacaacacaaatttatgatattcctgttctgtaggtcaggagtgtgatagggtctcactaggctggctggagtccaggtctcagcagggctgcattcctctttggagggtgtttccttgcctttatcaattctaggggcttcctgcattccttgggtcatgaccccctttctccatcttcaaccgcaaccttgcatttttctgatccttctgtggtcacttctctgacccagctggtgtgataagattgagcccactcagataatccaggataatctcctcattgcagggcccttaaccgtaatcccatctgcaaagtcccctttgccatgtaagggaacatagccacagtctggggaccaagacatgggcatcactgggggccaggattctgccacagaggcccgttgcacagccttcttggcctcatgcccaacgttggcccttgtgttttgcttccttccctgactcagcccatttcaggaggatgcttttgtggtcagcaaggattcaggctggggttggctttcagggaaaatggctggggcgaagggccaggaggggtctggcatggttagtggggtcttgccacagcttttcacccccatgcccatgtccctgaccttccatgctggcatggccctgcgagtccctgtctctagggagagcttaacacctctgctaaatgcctgggtgggatggcaatggaaacttttgtccctaaaggcagatgctggcttgcatgggttcaggagcaggtgtgcttcttgaacacccttaagtagtgtgagatgtaaagaggagcatagagacactcctgggcccctaccaagtaccgatgctgggctcttcccctccatctcttcattatcagaaccctctgaggtagtcagtctcgtttccagcttacctgtaagaaactccaactcagaggagtaaagggactcgcccagcatcacacagctagtcagggattctgacctggatctcctgtttccaagtttagagcttctttaagaaagcccatggacatcgtcttggtaagggagtgcagagggggcggggaggagaggagatatgaggctggattccactccactgaggaaggtctagttttctttgctatagaatgagggtgatagtcctaggcctgtggctgttttaaggattcagtgagatggtggatttatttatttatctgagacagagtcttactccatcacccatgctggagtgcagttgtgtgatcttggctcactgcaacctccgcctcccaggttcaaggaattcccctgcctcggcctcctgagtagctggaattacaggcacataccaccatgcccagctaatttttgtatttttagaagagatgaggttttaccatgttggccaggctggtctcgaactcctgatctccagtgatccggccacctcagcctcccaaaaagtgctgggcttacaggcatgagccactgtgcccagcctagatggtggatttaaatgcttcctaaaatgccagctgccaggtggcctttatcaccaggagggtcccacccctcagtgcgctgctcagcagtgggagcacagggagccccaggcttggagtcgagtcagtggcctaggcctggtccacgctcctgccctgagcttcacggcgggtctctgtgccttggggtgagcaggcagttgggttggtaaacaataacagtaaatttggggttttcctttgactgggttggagacaggaaatgcaggaggctgtgagtgacgagtgggtagagtgggtagcaggtaggtcgggtaggtcgggcctgctcagggtgtgaaggaaattcagttattcaagggaggagggtgagggtggtgaggctggggaaagtggctggcccacttactggtgaatataaacaaaccctctgggcactccccaggtggggcagagtggggacaggggaggctttgaggggcagccaccgcatcctcagccctgagaatgcagctcctttcgggctctgtctctggaagcctacatttaggggctccagccgcccctgggtccttttgctcacttcatcttcctgtcgtctccctgcactcagtcagaacagtgtggctccccagcatactcgaccactagataatccaggcacttggtgtatgtcctgtgctttgggagaaacaaatgaagtgtagggcacagttcctgcccttgagaacctagttggggagatacaaaatgcctgtgtgcagcagcaagtggctttgtcttccctttccctgtacccacaggcctggacacattaggggctgttccagactgagaacaatgtgtcattcaagcccaggtggcatagggcagcctcttagggccccagaggttttcagatgagcatgagtgaggtgaaaaaaccaaaatgacaaaataaaccacaccctggatcctcgtcctctggacgaagatctcacatctatgccttgttggggaggatttcagtcctcccccacccaggcatgtgaagattaaatgaggctgtgccaagacttggaaaggtgggggaagtgcaactcgtgtggaaagataggactgccccctgggctctgggccaccattcagacaggtcagtgccttggccttttcagcctaggctgctctttaaaaagaagaccttcagccactatccaagagtaaaaatgtcacattttcaacattcagctcatcttgagcacctcctctgtgtcatgcccagtgcttaggacttcggagacacacagatgagtccagaagtgggtctagcctttgtggagctcagcatagagaagtggcgggcatcgctgtaacagaagaactgatgctctccagaacaggagcagaggtggttggagtgcataaggtggagctattctgttagagacccaggagagcttcctagcagcccttcaagctggcacctgactgacagttttgatggcagaaaatggaatagcatgatggagatttccccattgcatttctgctctcacttctctctgcaagagctagatccttccttctccaacaggttcacccctcctgtcttgtggtctgaactgctgtctgtctgctcatctcgttagcttgacctttgacccctcatgggttctgctcatggaaatctgatttactcctctctgtggggtgcccttggtgttttctgtccattttccctttccagcccctccaacttggatttgcctcataaatgatgtttgctccctgaaaaacaaaatttggggatgtgggctgatggggcttttgccacgtttcactcaattcattaattttttaaaaagtgttacagtggtacaccttaaacttagatcttttgtagttaggcactttctgaatcatcatggaaaatgatgacattacatgaaattgagagccctcctggaagagcaggatgagcaattgttaggggcttccttgcccctcttccctctgccactaaaaggcctttctcatccctttgtcctcatggttcttactccactcagtttaaaagtggagcccttgggagcctccctggcactcacacacaaaaatgtcaatatacttggcgtccaccctttccatttttaacacaccaccatctggaacccagaattaccttggaatttacttgtctcctctagagggagtcataattgcttggaaggtaagttactgcccagagcctctggccaggaagtcttttggctgtcaagcctgcaggatttcaggtggggctgccaaggtggtggaacctgtgtttgataagtcatttttagggaccagggctgccatgcaaatgcatttgtttgcataactttcttgctctcagggacagtaaagtttcctactgccatcccacacccctgccaggatttgcaagtgaaataccaggactgactttccactttcccccttcatgagtcctcccttcctaagtcctcccccaccccttggttttggttttgtctctgaggtcctgtgtgaccaaatactagtctcaacctctctgatcctagggtagtagtgtttccaggaccctgatatgcaaagtatctgtacaagttatgcaaatgagcatcctgtctgggtggctctggtcctagccccgggcagttactagctctgactactgctgtccgagtgtgtgaaacgtgatcttgctccttcctctgtccaggcagctgtgggtctcttgttcctcaaacagctactgcctcttggggtaataaggcctcaagtttcagaatgagctgagttctcctagcccttaccttctgatctggagacatgtggttctgaattcaccagtcaaaggtttacttttgaaagaaaccacgatctcatctaagtctaagacagagaccttggttagctggagtctgtggtgcagagagacctggtatttgtagtaagacctagaggggcctttggttttctggcactcagctgtctccttttctggtcacaaacctattctaaggaaatggtcctcatagtgagactctagccctacccacccacaggagggtcgagggcaggaggggaaggatgacagccaggcattctttgagccagtgtgcaaggaagagaaagggtagacgagaaattcagtctgatcggcttatttcaggctctgaaaatgacagctgactcagggtaggtgcttagtatctgttggatggatgaaagcatctaaaggaaaattaacacaagtaattttagtaactcaaacaagacattatatgtacatatatagacatacagagtgaggcgtgaacctttctctttataacgtctccacctcagtgatgccaattccctctccagaaaaaacttcattgaacagctttattttttttgaaatttttatccaaaaagtttctgaaaatttatctagatacaaatatacttataagcacaactgagaaatttctttggcagttataacaagtacaaatggaatcattaggcatattgttctgcaacctgcttttaaaaaattgtgataaaatacacttaactgaaaatttaccatcttaaacatttttaactgtaaacttcactagtatgttcacattgttgtgcaactgacagactttttcatacccatgaaacaacatacagcttgcttttttcacttagcatatcttgtgaatttccatgaccaaactcatagaactatcattctttttctaaatagttgcagagtattttatagtatgatgtaccacaatttatctgctgtggatggatatttctcacctcctttcttttttatttgtcttttaacctcatttgcactgaaggactaccctccccccctttttctactatttatatagatctcacaaatatcttgtacagtatcttcgagtgtgtgtgtaaggatttctgtagtatagatccctagtagtggaatggcaagatctaagggtatacacattttagtttttgatagggactgccaaaaagacagtatcgatttatgaatgaatgcactttgcatattgctttccaagtgagagctttacgaaagggtttgctgtcagcagcaaatctgggggtagagtcagtcagccgagagtaaaagggcatttatagcacttcccaaaactgatagatgtagacccttggccacattgtgggcgagtggaaaagtcagctgtagaggggtttaggggattccttcaacatctccccatatcagtggccctgctcactcaattatggttatttgcatacattttgggcatgtaggcagaatggctcaaagacaaaaatctgaggttcagccttgtttggcctcctggtgtttgatcttgaccgggctacctgcttctctgactggcatgcaaatgcctgtgggggatgacaagtgtgcacataacataagtgacataaggctgactctggtgggtgctgtaagagaggcccagagtgctgtgggaagttacagaggaggcacgcctctggttaggaatagcagggaggaggaggcggctttgactccgggttgtaggtgttgtggggcacacaggacacatgcaggacccactatacaggagctcactagacaggagctcagccacattgcctcccaatgtgacactgattgtgtgcccagccctctgctgggtaccgaatctgaggcatcagtcttggggatggcttgggatgtggtggtcagtagctcagttgcatatggcacaaagataaatctttggagttactctaagctgggtcccaactatgagcagatgacttgtcctctctgagcctcagcttgtcaaccggtaaaatgggaattattattgaggcacccatgaacatgtgccccagagacctcctattatggggagcttatttgtccaagggccccagctatggcactctgaaattcattgtctcatttgtgtggaggccacacttcctttctcgtgctcccagtcaatgacagtacaacagggatgtgaagacgcacccgttcctgggagaaccaggactcgaaggatggccagctttgcccctggcaacttcatagacacttgtgcctggggcccttgtgcgcatcctcctctccctctttccttagtggggtcacacaccggtggttccccagcctcgcttcacactccctattttctctcataaagaaatttcccctaactgaacccttgtatgtgtaatcctgttttggcatctgcttcttggaaaatctagactacaatattatcaccaaccttagaaggtggtgaggactaaatgaaaaatcaggtaaaaaaatcatatgaaagacttagcatagttatataaacgattatggaaaagcctcagcctggcacatagttagcactcattattatcatatattctcatgcattatacagtgggtactgtagccatcattgtaccagtgtgagcaggttaatttaacttaggagactgcatttagaagtcaagaaacctgctttcctgccccttccctgctctatctcccgagttctctatcccctcacatgtgccctttatataagagtggcagttgttactcttaactccctaggctggccccggactcctctttttgggataaaggtgattaacgccgtgtggcttttgctgagaagggaggctgctacaggggtctgctgcagggacgttcagactcagtggatttgtagctctttagccccgcagagaggagcccctgccctgctgagctgtaggcttgctgggaggtagcaggagtaggtgggtgggtcactgaggggtgctggcagccgggtagtgttggcggtgggggctgagggaggatgatgggaagacagtgagcctccgagtgaaacagaccatgagaggcgaggtgagtcacaggtttctctcaaaacccccatgcccatggtctctagaatgtgccgaaagtggagcccgccatccccagcctaggccccagttctaagaatgcctccccttctctccctcccacagtcgcccaaattaatcaggtcctcggctttggggggtatcgttctcttttaagaatgcagcagagaaaaccgctgggttgtatcccagcaaaggaggccacagagattagggctgattgggaggaaatgtgagaagagcggtgtctagtttaggttttagaacctggctcttcctgctcacaccaccaaagaaaatttggcttgagagattcaaaagaggttgtgtggtgtgtaggctgcaaccctagattcctacagatctggattcatggtcttgctctagcacccagcagctcagagccctcagtgtttgtatgcgtcaattccccaattagtaaaaacagtgatttaagagcatctttgttatagcgctgttgtgagaatgagatagcgaatcagtattaacctttagcccagttcctaaattaaagccctatgaagagcctctcagctcagttcagagactgccagttcccccttgtgagtctttcttttcttttggatttttgatctccaacgactccataaggaagtgaaataattatccccattttatagatttgtaaactgaggctcagcttgattaagtacctaggaaacaatcctttgtagtacaggaccctgaggttcaacagtggtttatcgcctccttgggacaccacccaaaggcaaaagggaagcagcgaaagcatttgaagctcagagaggctcaaggccaagccacagcttagggacctgcaaagttcgcggagctgcagagctggacgggtggggcagaagccactctttccatcctccaggtccttgcggtggaacattcctcagttaccagcacaactcattttgagttttgttcacatgtcacttttctctttcttttctttctttctttctttctttctttctttctttctttctttctttctttctttctttctttctttctttctctttctttccttccttccttccttccttccttccttccttccttccttccttccttctttctttctttctttctttctttctttctttctttctttctttctttctctttcctccttccttccttccttccttccttccttccttccttccttccttccttccttcctttctttctttccttttctttcttctttttttttttttttttagagggagtctcgctctgtctcccaggctggagtgcagtggtgcgaccttggctcactgcaatctccgcctcctgggttcaagtgactcttatgcctcagcctcccatgtagctgggattacaggcacccgccaccaggcccggctactatttgtattttttagtcgagacggagtttcaccatgttggccaggctgatctcgaactcctgacctcaagttacccacccgctttagcctcccaaagtgctggaattacagatgtgagccactgccccctggccacgtgtcactttttcaatgacacctacccttattgtctgatttagaactgcaatttttcctcccacctttgactcctcactctgggcattctctgtaacccttcatggctctattttaaaaaatcgtttttattgaattactgtgtacatacacacagttatcctacttaattttcccccatagatctgatcaccttctaaaaatctgtataacttgtttataatggctagcatgtaacctccacaagggcagggatttgtgtctgttttatccatggacacatcccagtgcctggcatatagcagctctcagctacttattgaaggttggtgggaaattgctggcatccagtactctttgcagagaatgaagatgaacctccctgacttgacagtttcgtggagaacaacacaaggcgctgtatgagtcagtgctaagggctgtggtaacgacagcagcacgtgctgggtgggaccaggagcatgtccccagaagtctgtgagatccagggaagccctcctagaggaggttagttggcacttccatttctttagctcccccatcagctgagacagctcctcctgccctaatagagggaagggttcactctgtcaaacccagatacctcctgctctttctgcccatttcctcttgttctgccctcagtgggtcctgtggcggtaaccgcactaaccattccagcccatctcattccttaccccacagtcccagcaggctaagtatgggctgctgcagacaaattgcccacaggcttgtgtagcttggaaggggcaagcagcagacagcttgcccttggagtagggttgaacccatggatgcacatcctggcacttgtcatgaagcccaacacatagatgatgctcagtaaatataggatgagtggatggataaagctgagagttaaaagatgcctggaggccaggtgcaatggctcatttctgtaatctcagtgctttaggaagcagagcaggaggattgcttgagaccaggagttcaaggctgcagtaagctatgataaccaccactgcactccagcctgggtggcagtgccctaaaaaaaaaagaagaaaagaaaaataagatgctctgagaagacatttaaatgactcagtctctgtctagacacaacagtggcatcatttaaacaaatttctgttttttttttttttttactttactatgtgtttgtatttagcattttattttatgccactttccccaaatggaagcttgcgtgattgtattctgtgtggcacaaaatcaaggaaataggaaaataacaatgagaatgtagggagaggaggatacataccaaaagccctcactcagtggagccaagtggagctgaaacccggatagtaaaacctgctgttgtctagatgttcagacccctgctcctccaatgagccattctgaggacaaccctgggccacaaccctattgtgggggtaggagtatattccttggtcctcaagcttataggagaagtggagtgtcacaattcttacggggtcccaattcctctctgtatttatattagtatcacatgtccctaaacaggcatattgaagagtaggttgagacatgggcattctggggtatatctgagtcacagaatctcagggctggaggcccacaaaaggatacttttgtttatttctcaaactttctgaaatcatagatcaccaaatcataatatttgccatgctccacccttgcaaactttttacttaaaagatatactgactccaaacctctgaatagccacatatagagcataaactaaggggatggaattgttttaggtattgtggttgcaaaaagataacatttcatcagtcttcactaccagaacatagagaactctattatttttcccaattctaatagcacacttgcaattgttttcataggatctagactagagttccatgaactctataattgaagtcaccaatcccggaatgtacttactcctaagaaggagttctgtagccacattggaaaccacacccctttcttcttgatttgtcctcataggacatgaagagtggttggtgatgcctctttagattcattcagtgataacttacagcctgaggctttcatggggaagccaatgaacactgaacttcagagccttgacttgtggccagatgcagtggctcacacctgtaatcccagcactttgggaggccgaggcaggagaattgcttgaacctgggagacaaagtttgcagtgagccgagatcatgccactgcactccagcctgggcaacacagttagaatccatctcaaaaaaaaagaaagaaatgtgctctgtcataattctggagactagtggtacaacatcaaggtacctgcaggcatgtttcttctgaaggctctggagaagaatcctccttacctcttttagtttttggtggttgctggcaatcctttgttcatgggagtttaattccaatatctgtctctgtcttcatgtggttgtctttcctatgtgtgtatgtctctgtgtccaaattttagtcttataaggcctagtcattggattagggctcactctaatccagtgtgaactcattttaacttgatcacaactgcaaagaccctatttacaaacagggtcacattcacaggtactggagggttaggacttgaacataattttgggagacacagttcaacccacaacacccagtatggtcaacaacatggtgcagctgccactaaaggatcagcgatagtggtgaggctgcatcacaacagatgatcctggagaaggaggatgatcctcctaagctgcctggaccaggccagctccaggggtgtcagcaggacttgactcctctggcttcccttggctccatgacctcacactcccatcttccctttcatctttctggctgttcccccttggtttccattgctgagatctcttcctcaactcaaccattaaatgactgtgttcctcagtggcttaaactttctcttctcattctatatatatatatatatatttttttgagttggtatcctctcccatggctttagttatttatatactgatgactccagaatcttctggagacatctcctgaaatccaattagacatctctacttaggtatcttagagtagctcagctgaatacattccaaattgcgctcttgtttttttttgagatggagcctcactgtgtcactcaggccggagtgcagtggtgtgatctcagctcactgcaacctccgcctcctgagttcaagcgattctcctgcctcagcctcctgagtagctgggattacaggtgcgcaccaccatgcctggctaattttcgtatttttagtagagacagggtttcgtcctgttggccaggctggtctcaaactcctgacctcaagcgattcacctgccttggcctcccgaagtgctgggattataggcatgagccaccatgcctggcctaaactgggctctttattgtagtcctttttaatttaatctaatttaatttttgttttttaaagactagtcaaatgcagtagtgagaagcaggaaaagaggataacaaggagtttgatctgtagctgatagtgaacaatcaatcgagataatgtactacctttggaccagccaattcccaccccctctgccccgacactttttaatttttttaacctaggcttccttcaagatttccagcctcagtaggtggcaccaccatctgtccatttgcctatgaaatccttggtttcttcctttcctccactcctcacatccagccagtcaccaagtctaattgactttacatttgaactagctcacaaatgtgtctacataatgtcctagttattttgactaccactaccttggtttctggccaccctctgattttttttttttttttttttttttggcttggattactgtaacaggttttgaaatggtctcccagattctggttttattctcttcaaatccactttccatacagcagcctgaatgcaaatacaatcatattattttcctgcttcaatctctccagtagactcccaccctctttaggatatgagtcaacctccctaacatggcctgctagacactgcaagctctgaccccaacttacttctcgagcctcatttctctttattccctcttctttctgtcacttcccctgccccttgctttctcccccacatttttcacatgctgttctttcagcccagcacactgttcctcccttgctttacataattaactgacagtcatagttcaggtctcagcttaaatgtcctttcttctagggaggcctttcctgatccacaatttgcttgctcccatcagtgcctggtcaccaagttgcacaactccaaggggtgaaatttgcattgtattatgtgtgaatggtgcccctgaaatggtgcaatgcacgagccagcacactttgttcctcactgtcactgtttaattatcttccctcctggactgcaagctccaagtcagattctccgatgtaagtcttgtataaagtaagaactcaatcaatatttgttgaatcaataaatgagatcttaacagagaaatggctaattggaatgtgcacaagaaatatgaaacaaatttctggaaccctcccctcttacagaataatttaagtaattgaagatatttagtttggacaaatgaagatttagaacagatataatagctgctttcaatatttgtagggctagtgtgtgaaaatagaatacatttattctttttttatcccagaaagataaataaaagagctgaagacaggttatagggaagcaaattggggcctgataataaaattgaaataaacttccaaccctgagagttgtccagaaatgaaacagatggcacccaaagtaatgagttctgcttcactgcaaagattgaagtctgtaggatcgaactccatctgtaggatcattgagggcagcagctggacaagagagcttttgaggctctaactcaaaattttatcgtgattgtatggctgtggggaaagtttactttctacttaaactcaagcatttatgtaatgcctctgtgtgttggtcatcactggaaacatgcagaggtctgcactcatccctgtgctcaaaggtgcacagccaggttggaggcacagtgtcaagttcacaatctgaaggcagaaacttgcagagtatcgagtgtctaaaagttcagtacagagtgtggtctggcgttatgctggaaggcgtcacagaagagaaggggcttgaaaacggtcacagtggatgggcaagagctggagaggagggtccacttcaggaggaagaggctgatggtggagcctgcaagagaagcagacgtggccagtacacagccggcgtgcctcacacctttcatttacagcctcggagtctgcagtgggctttgcagcgctctggtttccctagctgaaaccaatgaggaagatgggatggggctggcctgagaatttgctaaaatgcaggagtcatgtcctgtggtgaaagggaatgaactcctcgtctatcctgaactcctttaaatattcggggtacactgtgtgagtcggagatgacttagctgctcagaagaaggaagggagtaagggaagccttggatcaaaggtgcccaacagtttatagcctcagacttcacgtgtctattttgtacatcttttggctgcaagcaactgaaaacccaattaccaatgacttaaaggaaaaattattatcttacatattgaaaatgctgaggtagttctgatcttggattggttaattcatgggtttaacaaaaacatcaatgtcctacttctttctgttatttcgtttgttgctttccacatgttgatttatcctctttggctgagtcccctcatggttcccagaagactttggcaattccaggcttcaaatgtggacatttagaggcagaaaaaaagcctagtttccttgcttttaagagtaagaaaatatttcctgatactccttcggtcctggagagactcagacctctctccatgttttgttatccaggttatatcacaaacccattcctaaatcagtcactggacaggcgaattaccatggaaggggcgcacttcccctgaagcacatggatgcccgatacctgaacaaaatcaggatttgttatcatgagagagaaggatgtcatgttttctcttgagttaggatgctaagttcttcaggtataatggagacgagggtagagatgacctggccagtactatttgccttacctgagctgggggtcccagtcaggatatgctggctgtgctggggtagctgtggttggttccttggtggagactgagattctcactggagcagtaggttgtgggttcaaccagatgacctttaaggcaacttacaatccttaccatgagcctggtattgtgctcggcccacagcacagtatctcttacaatcttcatctcagatctgcaagtgaagaattattattcctatcttcaggtaagggattaaaattatgtaactttcccaaggtcaatagtaagtgagagtgggaatatgaaatctggttagtccacgtataacataagtgtttgtccagtgtatgtctcactatgtctttcttccaacttaaaatcttccatgagtctggaacaagcctgggagtgtggcttagacctgtacttatcaaactctctttggctaagagccagattttttaaaaattttaatccattatggatcaaaattttttgtaaaatataaaaaaagaaatacttggaaaatgaaatgaaaatataataaagatatacaaaatacaagccctgttttaaattatttaatataacacacacacacacacacacacacacacacacacacacacagataatctgtcaaattgctataagattttccaaactcttaatttctgtacttaccttgccacaagctggcaacaaacagatcatggaccagccctggacttcagcccacactgagtagcactgattcagacagctttctgcctccatcctcttccctggactgcaactaaagatattcaatgatcggatgcctctgccgaggtgacagtgggagaattactggttgtaatgttaaggcaaacatcagaggaagagattagattttgccctgttgttttcataggaacttctgttttctttcttcctttcttttttctttttttctttttttagaagaagaaaattttattattcagtaagcattaactagaacgggatgtttgtcataggcaatttgcacatagattgcaaagtcagaaaacaaaattcacccttctatacagacaagcccatacaatcctttttccatacacgttctcaagataaacatgactagtcctcaacttgactagtcctcaagtaagacgacttgactgcactatttgttacacatcctagattcacctgctagcaggggtgaccgtctatgtttgctaattggatttatccaaaggaaaaataaatttcttcatatttttgtgacaagaggtgagttttggagagaggtgcctgcccacgttaggctcctactctccggaagagacgggaagtaggggcactgtcttccttaatgattgcatttcaaagagatggctcccgggtacttgagaaagacattcctgaagggaagaaagctggcaagaggcttatttaccttttaaaaagatttacataatttcaaacaggtagagaaagaacttaaaattacaagttttctaaagtaaatgctcacagggaaagttaagcctcttttttggaatttttaaattcagaggtacaagtgcaggtctgttacatgggtaaacctgtgtcgtgagggtccactgcacagattatttcatctcccgggtattaagcctagtgcccattagttatttttcctgatcttctccttcctcccaccctccaccctccaggacgtctattttcttcaagagatttatattagacttgagaaaacaatttctccttccttccttctttccttccttccttccttccttccttccttccttccatccttccttccctccctccttcctccctccctccctctctctctctttctgtttttctttctttcttctttctttgtttctttctccttccttccttttctttctttcttctttctttctcctttccttccttccttcctctctctttcttctttctttcttttctttctttctttctttcctcctttctttctttcttcttctttctttgtttttctccttccttccttcctttttctttctttcttctttctttctccctcccttccatccgtcctttcttccttccctctttctttcttttctttcttctttttttttcagcgtcttggctctgtcacccaggctggagtgcagtggcatgatcacaactcactgcaacctcaaactcccgggctcaagcgatcctcccacctcagccgctcaagtagctgggattacaggcatgtaccaccacacctagctaattttttgtattttttttgtagagatggggttttgccacattgctcaggctggtcttgaactcctgaactcaagtgatctacctaccttggcctcccaaagtgctgggtctacaggcgtgagccactgtgcccggcctcctaggaaacaatttcttgatggtgattttccatctttttgctgtgtaggaaagagattgagctccatggtaatatgtgagagagaagagactcaagggactaagaacctgtaccacaaaaggaaggtctgttttggagatttgctggagcttccccattggatgtgtcattgaatgatgattcatcctggccaaaaataaaagcttcttaagctgggtgactctaagtttgtgtgtggtttacgcttggacatgcgttacttttatgacataaaagtgacttcaatctggtaagatatatttataaacatagaggtcctttcatttattaggaaattccaattgtgttacggggtcttcccaagagatctaaatctattctcctctaagatttaggaaatctaagccgggcatggtgtcactcctgtagtccaaacaccttggaaggccgagacgggtggatcactcaaggccaggagtttgaggccagcctggccaacgtggtgaaagcctgtctctactaaaaatagaaaaattagccaggtgtggtggcatgcacctgtaatcccagctacttgggaggctgagacatgggaatcacttgaacctgggaggcagaggttggaatgaaccactacactccagcctgggtgacagagtgagactgtcaaaaaaaaaaaaaaaaaagtttgaagaaatctggaatgatcatttgtccagtatatgaaactctgagaatactacacatgtggaaactagaatctatcagaaattccaggatgctcaaatatcttctccctctccttcattcacaaatgatttgaacacttatatttttccttctactgctttctactgattttccttctactgctgtgagtctgatgggcttcaataccattgtggttgacttatccaaatgtgacttttcaattctgtgacttttatatctccaatgaccttttctttgcctctacacagcaatttgctctaacggttacagcctggattttgttattcctcaaaatgacaccacctccaaaaatcccttcatttgagcattccattctcttgccacagcctcctctctttagtgattcagatactcccactacaactcttccttgacctcatgatcaacatgcttccttttcttttttcagctctctcctgcctttatttcctgcattattgaacttagactgcttggttcatcttttcattcaggctcttagctatacagacataccttagagatattgtggatttggttccagaccactgcaagacagtgaatatcacaacaaagccagtcccacaaattttttggtttcccagtgtatgtaaaagttatgtttatactagactgtagtctattaagtgtgcaatagcagtatgcctaaaaaagtacatcaatatacatatcttatttgaaaatactttattgctaaaaatgctaatgatcacatgaaccttcagtgagttgtaatctttttgctggtggagggtctcaccttgatgttgatggctgctgattaaggtggtggttgctgaaggctgaggtggttgtagcaatttcttaaaatagacagcagtgaagtttgctggattgattgactctttcacaacagatttctctgtagcatgtgacgctgtttgatagcattttgcctacagtggaacatctttcaaaagtggagtcagttctctcaggcctgtctgctgctttaccaattatgtttatggagtactctaaatgttttgttgtcatttcaacaatattcacagcatcttccccaggagtagattccctcttagtaaccactttccttgctcattcataagaagcaactcttcatctgttcaagtttgatcatgagattgcagcaactcagtcacatattttcagtctgcatttctagttctcttgctatttccaccacatctgcagtgatttcctccactgaagtcttgaactcctcaaagtcattcatgagggttgaaattaacttcttccaaacttctgctaaagttgatattttgaccttctcccatgaatcacgagtgttcttaatggcatctagaatggtgaatcttttccagaatggtttcaatttacctttcccacacccatcaaaggaatcattatggcagctatagcctcacacaatgcatttcttaaataataagacttaaaagccaaaattactccctgatccaggggctgcagagtagatgttagcaggcaggaaaacaacattcacctttttgtaaatctccatcagagctcttgggtgaccaggagcattgtcaatgagcagtaatattttgaaaaacatcttttttctgagcagtagatctcaacagtgggcttaaaatattaagtaaaccatgctgtaaagagatgtattgtcatcttggctttattgttccattgatagagcataggcagagtagaattagtataattattaagggtcctaggatttttagaatggtaaatgccctcaaggtgggcggatcacaaggtcaagagatcaagaccatcctggccaacatggtgaaaccccatctctactaaaaatacaaaaattagctgggcatggttgcgcatgcctgcagtcccagctactcgagaggctgaggcaggagaatcacttgaacctgggaggcagaggttgcagtgagccaagtttgcgccactgcactccagcctggtgacagagcgagactccgtctcaaaaaaaaaataaaaataaaaataaaaaaggaccttggcctcaacttagagtcaccagctgcatcagcccctaacaagacagtaagcctgtccttggaagctttgaagttaggcattgacttctttctagctatgaaagccctagatgacattttcttccaatataagaatgttttatctacattgaaaatccattctttaatgtagccacttttatccatgatcttagctagatcttctgtttaatttgctgcagcttctacgttagcacttgctgtttcaccttgtacttttacgttaagaagatggttctttttccttaaacctcatgaaccaactactcatagcttccaacttctcttctgcagcttcttctaatccagagcaaggaccttgaattgaagagagtgagggccttactctggattatgctttgacttaagggagtgttgtggtggatttgatctatccagatccctcaaactttctctgtatcagcaataaggctgtttcactgacttaccatctgtgtattcagtggagtatcacttttaatttccttcagaaacttttccttcacatttactggctgtttggtacaaaagccctagcttttggcctgtctcagctttcaacatgccttcctcactaagcttaatcatctctaggttttaatttgaagtaagagatgtgtgagtcttccttctccttgaacacttagagaccattgtaggattattatttggcctaatttcaatattgttacatctcaaataatagagaggtcctaggagaaggagagagctggaagagcaggcagttggtggagcagtcagagcacatacaacataaatgaaatgtgaaattactttctaaaccccatggagggaaatgaacaattcccttttcccctaaaataatgctactaaagcaattagacttagtctagacaagacagaagatgtataagtgaaacattagaagatccttaaatgaagagtgaattgtagttgttggtgaaaaacaagattaattttatatttgctaccataaagtttttgtgtatcacttatatcaataatgttatcaaaagcttacaaaaacaaaaatagatttactttttaaaatgttgttttaattttagagaaaattgtctatttaaattgagtgaaactgcatgcgacatatgaacaaaagtgacagttcaatacaacataagaaaatcagagcaaggaaaatatttttctgactttgaaggcaaaaattcatgcacaaataatcctcaaactaatttcaatagaacctattttctgctcattatagaacaagccataatctcaacagtagagagatttgaacaaattggtaactttgaaataatttaagatgtagcatatggttctagatattgctttaagagataaaaattacaatataagtgatagcaatttataggatgaaattaaagcattttatattttgtgcaagaaaatagaatacacatgacattgatcagttaagttctctgtcttatatggacacagtttgtggtgccccaaaacaactacagtattagcatcaaagatcactggtcacaggacatcacaacagactgaataatcatgaaaactttggaatattctgagaattaccaaaatgtgacacagagacacaaagtgagcacatgctgttggaaaaatagtgtcgatagacttgctcgtcatggattgccacgaaccttcaatttatgaaaaaaccctgcattatctacaaagcacaataaagtgaagtgtaataaaatgaggtacacttgtactctcaactcctcctcctcgtctttttgttatactcacggggcaaaacaattctgccttctatgtattgctcccccggctgccaaaagaatcctgagaaaaatgatatagtctggcagaccatttcaattcatgatcacctacctcaactgagctcaacactgcctgggaatctactacatttctctagagtcgtttgtcttccgtgtctctgcaaacatcatttcaaacctttgtttctctccttaaaccgccctgcattctctccttattcattctcttaagagtaaatataagtcatctgatgaaattaacctcaacttcctgccaacgattcttcaaaccaacctgcttctgtacccaccgtctctactttcttcctgttattattcagaggaggtgccctcttcatttcaaaggtagttctttgctctgcctgcatcccaccccgtcctgctttctgagtaacctgacttcatcagttctcccatctcactcttctgtcttcaacttcttcttctcctctcctggcccaatgtcttgaaacagttgtccacgcttgtcatcctattattattatttgagatggagtcttgctctgtcacccaggctggagtgcaatggcatgatcttggctcactgcaacttccacctccctggttcaagcgattctcccacctcagcctcccgagtagctgggattacaggcgtgcaccaccacacccgactaaattttgtatttttagtagagatggggtttcaccatgttggccaggctggctggtcttgaacttctgacttcagatgatctgcctgccttggcctcccaaagtgctgggattgaaggcgtaagccaccacgctggtatagcaggcatgagccaccccattttttcacctcctatttcatgtgcaaccatccgtcttccatccctaccgctctacatccctacagctctacatccttacagctcttcttgataaaatcaacagtgcctttcatgtgttccatgcactaggggctcttttgccttgattttacttgacgttttgatagcatttgatctagctgaccattctctttctcgaaatagtttctttccttgtcctcagggatgccactctcttctggtgtttctttttatcgctcaggccactctttaatgagtctctttgacagcttctcctgctctggcttatgaatatctgggttcttcggagcttggttctgggctctcttctcttccattctgcactgttttcccttggtaatcttacccactcccacgattttactcaccatctttgtatcaatgacccccacatagtgatctccagactcaatcttgatgtccatctgaccacgtgtatattttcacctaaagactcagaggcacctccaactcagcaggaccagtgtagaccagatcaccttccccttcaaacttgctgcttctccacccagctgctcagacaagagatgagggttcaccttggccgtcgcccactctcaccattctgacctaaataattgcagactatttgaaaccttgcacttctctcaattcctgtttattaccaccttagtccagaacacaatttcttcctgtctggactggaagcaaatggctcctaaatggtctcatacagaaggtatatattatcctctctgtttaatagccttcaatggcttccctttgctcttagagtctaaatttttgaccatagcctaccatccctgagtgatcagacccatgcccacttcttcaagctcgtcttaaatctctccccatcacatataatgtcccttactctctgtgattcatcttttagtttctcaaagagtttaagtttcttcttgcctcagggcctcagaacatgagatgggatggagaagtcagagagctgtgaagagagcccagggtccagctgggtcgtgaattggtacaaatttacctttgctccagagataaaccccttctcccccgttctttgctgttcttagtggtctttaaatctgcaaaatgctctgcttcttaccacctctctcttcattgggccagctcctgctcatccttcatgtccagttgaatgttaccatctcatgaaagcatcccctagccctgagtctaggttagttgctttctgaaatctcacacttctaattaatagaaataatcatgattataataacattatatagttaactttataatatctgtttcctcaactagctattaaatccgtgtagctggagccaggattggtgggaggctgaggaaggaggatcacttgcacctaggagttcaaatccagcctgggcaacatagtgagacccccatctctatttaaaaaattaaaagaaatccacgagggcaaggattatgtctgtcttattcactgctttttcttcgacacccagcatagtacctggagcataataagttctgagtgaataagtgtgtatcttgtaaaacctctggcttggcttgcctccaagccagaggtttggagactcctttccaaaaaaaaaaaaaaaaaaaaaagaaaaagaaaaagatgtaatagatgactgccaaatagaactctgattgacatgaggcaacctgtctttccacacaaagtggatgactccatctttgcagattatggagaagcaatctgcttctctttcgatttgggtgtcatgatcatcagacatgaatgtggagattattatgtagggagattcaattagttacttaatgccacatactgaccaaagttactaattcagccttggtgaagagtatataatagggtcagtttgcggaaataacatcccacttccctaagtaatgcaggaagacttctttaaataagcataagattccgggttgtatactggacacacaatgagctctgttatgcaatggcttcatgaccttggaaaatatttttttcttgaataatagtaagggagaatagaatagttggctgaattctcatatttcatattgctagcagatcagcagcaatgatggagaaagcatatttgagcaaagtccagtgctgtaatcgaataagctttctacatggttgatctaatctatacttaatagtatgtgtagctattattgctctaaatggcagttaggcatgtatattaagctgttcactggatttatagaactctaggggctataattcataatgtgtatttttttacttcaccaagccaagcatttctgaggtcaccttcaggaaattgaaagtgggcactcaaaaatggttgcttcctttctttcccttccaagtgcagggacaaaccatttactctttccgcccagaaatggtggtagggaggcagaaggcactgtaaggaaaagcccaggtctatgattggtacaagcgcaaggcatgtccagctattttccatggtgttggcacctattgttccatctggttggatgggagcattttcccaaatgtctgcgatagagctgcttttattaagtatttactctgtgccgggagacttttatgtattcaagcctttattttttctgacgacaccttgaaagagtaattattctctccatgttacagaggagaataccaagctagggaatgtctcaaggtcatgtagctgagaagtaagtggaagcctgggctcagactccagaggctgtgcatgtcaccctgtgctgtagagtcagaggtacgctgtgtcactttccttaggtcttttatgtcccccttgtcctctccagccagggtgccaaggaggcctctggaagctaaaggctcaatggcagctcaattctgctgggggagggagctgttgataatacacagataaatgggaactgcctggcaaattaggagtgcagatgctgtagacacaggaatgagtcctggaggaggattccagtgggaataggcctggtggactggaggagtcagtggctggaatgaggaactacaggctcgaacagaatttagaggtcatctagtttagcgacttttaagcttttaattgaaggactgctgctattaaatttctccagagactctctgttttaaaatgttttggctgcttaaaaactttttaaagaaataattccattttctgattgccttaatcaaagatgtaatagatgggctgggcatggtagctcatacctgtaatcctagcattttgggaggctgaggcaggtggatctctggaggccaggagttcaagaccagcctggccaacatggtgaaaccccgtctctactaaaaatacaaaaattagctgggcgtggtggcgggcacctgtaatctcagctacatgggaggctgaggcgtaagaatcgcttgaacctgggaggcagaggttacagtgagctgagatcgtgccactgcacactccagcctgagcgacagagcgagactccttggcaaaaaaaaaaaaaaaaaagaaaagaaaaagatgtaatagataacggccaaatagaactctgattggcatgggacaaactgtcttcccacacaaagtggatgactccatccaaacagggagaagtgctttttaatgagcttgtgcagacttatgagaggaggtgttgctaaatgcacaatttccatgaggctttttcaaattttggaaattgctcagactacccccatcacctgctataagcgctgtcactcttgtccccaggagcgactggctccactgtagtggccacagaggtgaatggttttccccaagggaaaccattgattcagacctattttcttatttattgttgaggaaactgagtcccagacaagttaagtaaaatctttgaagtcaccaagtgagttagtgcctagaaggggtattgaataatggaacccatgtgtcacctgggacccactagcccctgaagatatgcaattgactggttcattctgtagccagttctgtcgcttatgaaagttgaaagatcttcccattatttaaaattctgggtttatgttcttacaattcagctcccatttccttggagtgttaggtctggttttccctaaatcaccccaggactaaagctggttcccgtattccacagttaaaactactcatataagtgttttgagggggacacatgtcacagaatgggaagttttgtcactgaactaacttgcctttctcctttcctttcctttcctttcctttcctttcctttcctttctctctctctctctttcttccttccttcctttctttctttctttttctttttctttctttctttcttctttctttttctttttctctttcttccttcctttcttctctctttctttctttcttccttccttctttctttctttttttctttcgttctttcgttctttttcttttttcttttctttctttctttcttttttttttttaagtttcgcttttgttgcccaggctggagtgcaatggcacgatcttggctcactgcaacccctgcctcccaggttctagcgattctcctgtttcagcctcataagtagctgggactacaggctcgcgcctgactattttttttgtatttttagtagagatagggtttcatcacgttggccagactggtcttgaactcctgaactcaggtgatccacccgcctcggcctctcaaagtgctgggattacaggtgggagccacggcacctgctctcttctttcttttcatctctgatctcttccccttccttctgccttgtgcttcactcccagggtggaagaacccatttgcttcttctctaatttctgtcagtggctgcataggtaaccacattgtcatcacagattgcaggggcttctcaccagttccaccttccttacctccaaagccagcatcacagacaaacagattttcattctccactgttttccaaactcaagtgtaagggcacagagtagacatggaagagaggaaatggatgcttttcttagagaataaaggcttgttgaaaaaaaaatcccatcaaaacctcatctctgtgctccctgttcaaaacacatatgtaccttcatacctgagatttcatttggcagttatagcaaacctggtatattagtcagctcaggctgccatagcaaaataccacagactgggtggcttaaacaacaaaaacgtgttttctcaatgttctggaggctaggaagtccaaaatcaaggtgctggcaaggcaggtttcattctgagtcctcttctcttggcttggaggtggccgtcatctcactgtgtgctcacatgacctcttctttgagcacacttgggggtagtggggggaagacagcaagctctctagtgtcttcctcataagggcactaatctcatcctgagggtcccacccttatgacctcatctaaccctactcacctcaaaaagttccccacttcaagtaccatcacactgggggaaagggctttaaaatatgaattttggtgagacacaaacattcaggccatagcacctggggagacgttttgctagtattccagatgagaaactaagccttagagaaataaatctattagagtgagcctatgagagaggactggtgggagtgtgcatgatgatggcctatccaggcacactgaggcccacccaactcctcccctttgccctgccagctcaagagcgcaaaactatttcttctagattcttaaaaggttgtgattgttttaaaataggtgcacaaattcttggacactcctcccttcaaaaggcagaatctaattccttttcccttgaatgtgggctagacttactggttcacttctaacaaacggaatatagcagaagtgatggtgtgagatttctggaattaggtcgtaaaatatactgcaactttctccttattctctcttgcatcattggctctggggaggacagctgccatgttgcgaggacactcaagaagccctgtgaagaagaaccaaggccacctgccaacagccctgtgagtgtgccatgttactcatgaatccgttagcccagtcaggccaccaggtgactgcagccctggctgtacttctgacaaagcctcattagaaatcctgagatggaattcctagttgtcactcccagactcctgacttacagaagctgtgagataacaaatgactgttgttttaagcagctaaattttgaagacagcaatagataattaatacaaagagaaaagtattttattctatactcagttctccattctccatgttacccatgtggccaagccagattgacatttctcatgctcccagacagccagtgggtcaaagaagaaattaaaagagaaatttaaaaacatcttgagacaaacaaaagtggatacacaacatactataaaacctgtatcttaatttttcatgatacaaacagaattatattaggaaagaagaatgatgcagtaatttacctgtgaaaatgactttaggagtgtaggataatcattaagaccacggactgtcttttaatagctggatgaccaaaggtaaattatatagcttctctgggtctcattttcactacatgaaaaaatggagatattaatagtgcctaatagttttacctgataattaatgagctaatatatatcaagtacttagcaaagtagccagcaaatgactttagtcaatgttcatattgccattaacataaatatcaggtatactggaacaattatacacacaaacagatgataaattggaagtgcagagcctatgttttctcccaggttaacctgtgatcaactcatgatttaaaaagctgggttaatatggttgtttagaaaccctgactgtcaaatatgatctacagaatgttagattattaaatcccaataaagcaaatgtaacagaaaaaaatgactatcagcttcctcttggagaaaacagcaataatgccatcttattgctacataatacataccaaatggcttaaaataagtgactagcttaataaactgtagttgcttaataaattgtagctatcattaacatcttttcagctgtacagctttttttcaggtgagtttctgtttgtttcagatgcccacttcgctcagatgaaatgccaggctcaaactaaagtcagtatgcattgcctggaaggctaatggcctaagccttccaggccaggggacttgtgaaccctgaaaatttaagacaggtctcagttaatttagaaagtttattttgccaaggttgaggacatgtgcccgtgacacagctttgtcacacagcctcaggaagttctgatgacatgtgcccaaggtggttggggcacagtttggttttatacattttagggagacatgagacatcaatcaatatatgtaagaagtacattggttccatccagaaagatggggacaactcaaagcagggaaggggcttccaggtcacaggtaggtaagagacaaatggttgcattcttttgagtttctgattcttttccaaaggaggctatcagatatgcatctatctcagtgaacagagggatgactttgaatagaatgggaggcaggtttgccctgagtagttcccagcttgacttttccctttagcttggtgattttgaggccccaagattttcctttcacagactcaggatgtcttcttcagttcaggatggacagcctcagagtagagagcttcaggccccctctccttatcttctgctaacctccattcttactcctaccctttcatctcagaattttcgctttgatgtttcccacttccttcctatggttactttaaccgaagtgagtcaggtcttactgaaaaactgaccacagcctgtccgctcccagccttccccagaccagggctgcccaggcagagcgtgagggggactagtgtttactcagctcatttttttcctcctctctcctctaagtcacggggctttgagtagggcttccccagccaccgtgcccctcccagcagaccgcagtcagaagccaatctcacatttgtctggtggctcagagaggggacagaaagagcagcagcttatgtccttggctatcctctcaagtgggctaatttgcttattttcaactctgttgggtccagccctgttgcctctgatctcagctcaaagaggatttggcgggagtttttggttgtgataaccaataacaaccaactatacgcactgcgaacatctcctagtgccagaagccctgttagctcattatcttaatcctcaggataacccaggcaatttgtattcaccctaaaaacttcccctggccgggtgtggtggctcacgcctgtaatcccagcaatttgggagactgaggcaggcggatcacttgaggccaggagttcctaaccagcctggccaacatggtgaaaccccatctgtactaaaaatgcaaaaaattagccgggcgtggtggcacatgcctgtagtcccagctacttgggaggctgaggcaggagaatcacttgaacctgggaggcggaggttgcagtgagctgagatcatgccattgcactccagcctggagacagggcgagactccgtctcgaaaagcaacaacaaaaacaaaaacaacctccaaaaaaccttcccctgtttacctttctaattttggtacctacagaatctccccgttagccttgaaaatcagcatgatctttaaggatttaggagcaaatctttaaaggattgagttgtgggaagaccatgatgtctttgctactcgcttttgcagtgagaatagctttttctctgatcaggtttggagccttccctctctcctgggggtggggggtagctggcttcctttctctgaaatgcagaattcattcacccactctcttttgtcttgggagctttgagagaacaattttagtcagacaagagtcaactgacaccagaacatgatgtgaataagatacatttatttattcaaaattaaaatctgctatgaagacagacaaacaatgtaacattcccagaggaattgaataaattctagttaaaactgagttctattagaaccaaatttatttttatttttattttttgagacagagtcttgctctgtcacccaggctggagtacaggggcatgatatcagctcactgcaacttccatctcctgggttcaagcaattctcttgcctcagcctcccaagtagctgggattacaggtgcgcgccaccatgcccggctaatttttgtatttttagtagagacggggtttcaccatgttgaccaggctggttaggaactcctgacctcaagtgatccacccgcctcagcctcccaaagtgctgggattacaggcgtgagccaccgcgcccggcctagaaccaaatttaggttgttataaataacaagctggccacagctttcaagaatgaagtggttggggaatgaggttaggggaatccctccgagacactggaaggtgaattaatcatcaaaggggctccctggtttctcttcctaagagtatttgtagcagttaggaagccccaagcccagagacaagataaattagagggaggtcagggaaaacagctcaacagctagaaagcgtggtcaggcttggaatggaagcttctgttggctccccaaagaacattttttttcctcccttatgtaacttataatttatcttaaaacactcaaataccatagtgtgtcaccctatggaaacagcttaaaaacaggtgaaaataataaatattgaaaaaaattataatattgggcttctttctaaatcgttcacagagaagctcagtaaataaatagaaatgggggttgaggtatcagaggtaataaatattctatgagagaggtacaataaggtttctcaaggggctgggtcagctatcccagagccccagatccgattttggagacctctaatttatgtcctagagtctatagagtcgccaccctgatgtctcagtttcgtatcttcattgtcatgtaggcttctatgtagttgatgaagatgtcaaactcactcatggctttgtagatgcctttctcttggagctgtgcagagagataagaaacatacagttaaaatcctttctggggactaaataggctcccctccctcatgctcatggatgggcatgaccttgagtgcagaggttgcttgttctccctcacgctgggaagtaaaccagaggataggcctagctgccttgggaaaggctgtgcattgaccttcatctcctccaggcctccccctagcaaggggagcattcattttgcaaagcactgtcttcaaaatgatgccttttcaacaattttaaaggtcacgtattcacatgatgattatgcagagtttgatgaaaagacattagaggaagcgcttcgaaagcaagacggtgagaggagaggagggagccttttaaatgtctgtgttctcccaccaacacactgagcaggccctgccctgccgccctgacctactatgagaaattcacaccccctgatgttggcactctgtgcagtgtctgtccccagcccacgaggaggacataggccgcacggtttctgggaaatcagactgaaaaagttcacgcacagttggaagtgtgaaaccccatttcgtttgggaactgacattctcaggcacctccgcaggtgcgaagggcagatggaaagcgggcttgaaccaactccaggttaagtgagaatccagcttcctgctcattctgagttctggggagtctgggctgaacccccaggtgtatttgtatgtgcacatttatgtgccagcttcctgcacgtgtgggttcagcctagattcccaacaagctactttctgtactttctgtttcctttgtcactctccccagcatgcagctcactgtgttcacaggctggccggccagcctaacccgcaagcctgcaaaggcagcgagcagtcatttagaaacccccaaagacacttaacagaaaacaaatacaatcaaggcagcagctcctcactggctgagcaggtcataccatctgtcaggttcccacactctctccaatgaagaatggggcctattgagtccccaccaccttccatgctttggggttggggagtgggcatgggttgtgctctgcagaccctctctgccaccatccaagctcaccttattaaaggcattcttcacctgctccacggccttgctcttgttttcacagggaagaaatcgatgctgtggaagaaaagagaaagtgttggtgatcctggcttccagctccatgtccatcacacttaggggacaagctggtggcatcatgaggaggccagatttatccaaatgcctcgcctcacagctcccagagagaactgagccctgcttccatggccctgggagttaaatgtatttctccaggactcactccaagatgtttgcaaggcttggatgacaacccaggtcttgggattccttcctcccccagaactctacagtatctcctgcagtgctgagcgaggcattcttcagcctgtccttttctgcctctctctcctgttcctccccgtcagtcacagccaccgaggaacacttctaagcatctgaggagggaagctactgggaccaaacccttcacatagccttgtcctacaaatagacaccaactgattttccaatattggtgacagaacaggggaaaccattagtagtgacggcatcatttcagttggagaaataaattacctggaggaattactcatagacactagcctggggatgaatagcccccttgtcccttctaaaatgccaggggaaatcctgtcagtcaattgggcccttcttagagctttgctttcaaaacattgagattaaaagaggtgaatgatgtttcctctgcttgggaaccttagctccccgcccagggtctagttacaaagaggcagtggaggcctgactgaagctctgggatccttttatgaagagagaggggagtagttaataacccacaaatgactcacaaataacaggaaagctgtttgcaaatttcacatgtaaatgcctagcagccacccccaacgcctgctcaaagagaaatgagcaagagatctgactccaggagtctttcctcatttacagctagctctgccagtctgtgtctttgctgtgtctgtggatgtgagtgtccctgctggtctgtaggagatggtattttgggggcagctgcaagggaaagaactgatctgctacttacacagcgccgtagcctcagcctgagggtcttcaggttctcccccagggagttcacatgcgccttgatgtctgggtcttggttctcagcttggggcatcacctcctccaggtaaaactggatcatctcagacaaggcttggcaacccaggtaaccctaagggcaggagccaaaggtgagtgagagattggcggaggtggctgggaggaggggctgctgcaactagcttaagaggacagcttggttctagcgatcctccttcaccagaagcctccccgaagggactgagccctttgtaaaccctctggctgctggatgtgctgagttaacatcttcccacttctccttttcaaagcgaaggaaacaaacccaattccctgcaatcaggaagcagagtctcccttcccttaatcatgctgcacactcccccagcaccccgcccctgctctcaccttaaagtcctccagcaaggactcctttaacaacaagttgtccagctgatccttcatttgctgcaggaagaacaaaaggagaatgaacttgaggtttggggaaataactgaaatgcggtctttttgatgccctttcatttagagatttttttttttaaatcaaattggctctggcccaaaaaaatcaaaaggggagttttaaaaacagaggattcaacagtgatgggaccatcacttaaatcaggtcctcctcctcagagtcaagttatttaaaaaatctggccgattttgaagggaaagcagaagcttgactcagtcctggtcttctttctgcggagctacattaggctttaagggacacctatgtcaacccttcggggccttgagcccccctcatgtcctgttctctgcttttctttctccccactgtagacatccagtttagcttggaaagatcccagggattaagaagctccttctaatgcaggtttccctcatgtagagtgcttccctaaaccactggtctttcaggtctggaaacgctctaagcagaggcaatttaaatttccctgctgcaaggcatggggagcatcttcacctcgaatcagacctttctttacttctcctagccaataaagtatagagcgccagcaggatcttataagtttctcagcacgagaaagaacgcatttactttataaggcaggtttcctgcacatttactgtatcatctggcttagcttaactcaccaaacccatggcttgatctaggattctcttaagaatttaagtttgggggaataggtgttggggatggaggtggaggcgcaggaggagggttcttatagttccaggagaatgtctagttcaggcagtcccaggaagagagaaaggacaggaaggaatcatactcacaaagaaagtcttcactctgctgaaggcatctcggagatctcgaagcatgttaggcaggttgcctgggaagtgggtgcagctgttctcagactgggtgccctggcctgggctggccctcaccccagtcaggaggaccaggcaacagagcagtgctgagctgtgcatgccttcttttgcaagtctgtcttgtggtttggttttgcaagagcaagcccctgatgtgtagaccttcacctctctgtcccccttttatattgtaagctcagggaggcctcttcattcattaaaaagccacaatcaaggtttcccggcacaggattttttctgcttagagctcctccttctctaacctctctaataaacttagttttcaatttttgcatcgtaagcaaaaatgattggttgaacatgaacttctgcattacagctatttttaggatgggctacctctcttagaataattttttagcttctcaattaaaaaaagttgatttcctggggagaacagctgttctgtgcgcagaggccctcagctgtgggttctcattcgcgtgttcctaggtcacagtgacgtggacaaattgcccattccagaatacaatgggattgagaaataattgggtccccccaacctgggatgaatacccaagacttctccttgctaacttaggcagtcaccttaggtctctgggccttagtttccccaagtaaaaatgagggggtgggctaaatatcctcaaagttcccaagcagcccttccattttactttccagagactggcttcctacaggacaggcggggtcacaggatgtgttccaggctcctttaccccgatttcattaggattctcaggcacatgtttccacctcttcagctgtcccccaccccaactgtgcttgggggaagtgggtaagagtagtctgcacttgctgaaagcttcttatatgctagtcaggtagtgctcaccatgacccctaccgtctctattttatagtgagcaaactgaggcacagagatgttacatcacctgtacaagggtacaccagtgccaactgagaatttggtttcctcaccctactgtacaccatctccagcacatagaatgaaaccttggattaaattggccttagagtttcttttagttgtaagcttctgtggctggagtctaaagtttaaaagatggggtggaagaagttgaaataacaaggaaaagaagtcaggattccatggaggctggataggaggtcccttactttcctcttacctatccctacttccccttcccaaagaagccttagtagtgttgtcttggatttgtgtgtgtgtgtgtgtgtgtgtgtgtgtgtgtgtgtgtgtgtgtagaaggtaaggggagccagttgggttgcggcgaggagtgttgctctacctggggaaggaccggggcagtgacatcaggacttcttcagatatctggaaagtctctggggatcctttgattgagccttcaccttccccttccacaggggctttgcctgccattccagtttagactgtaactgggaggaacactgacctaggtgcaggaggcctgggctctgccttggccctgccactctatagtcagggcaaatcactcatcctccctgtgtctgtttttcatctgtcccaacagggcaatagcacctgtcctcctgcctgccagggagcattgagcttaagtagccatggacccagatggagggcatttccagtgttctgctagttcttcacctttctgcatcagcaatgggacaactccagtggcagcaggttctgagcttgctgcactagagaaggtcactcactgcaaggggtgcaaacaccttggggcccagccagcgtgaagtgagtgggagggagggatgagagggcccacgcccaccctgtggatgtccctgctgtgtgacctatggatcagggtcaggggactgtggtgtctcttcccaactcttcagggagtgtcaatgtagaaacctaagaatcaggaagtgagaaagagcctgctagaaactagtatggagctaactcagaacttactggtcctgccagacttagactggcttaagggttctgtctgagttctgctgccaggaagcagagagaaggggaccaggacctgggtttccccttcttgcacctttctccttccccctcggctcctgggttttctgggctgtgtctgtgttagcctgcaggtctaaccccctctctgagctgggtgttccagaagtggactcagcatgggcaccaggcaggccaggggttctggactctgggtgaggctgtgaacccctccttcctttgtttcccatcttgccttgtgcttacctcactaggaaacctgcaaccctacgtggttatcattcatgtacacaccatgccctgccgaatcagctttgagctccctgaaacaggacattgttttattaatctttgcgtacttggtacttagcaccaagtctggcccttggaaggtatcagctatacttgggatgggcatagaagagtgccctgtaagcctggagggtgcgaggctaaggaggtggtctgggcacaggtaagcattcagaaggagagggagagtgactcagggatgcaggcagcctcccttcaatttccttatatgagatgtgtgtgtaaatacacacacacacacatacaaaatgtcagggagaagggaggtatgtaaaagccatttgtacctttctttcatctataatctgttaaatagggttgaggttaggatctgacttcttttttttttttgagacagagtctcgctctgttgcccaggctggagtgcagtggcatgatctcagctcactgcaagctctgcctcccgagttcaagccattctcctgcctcagcgtcccgagtagctgggactacaggcgcctggcaccacgcccggctaagtttttttatttttttttgtatttttattagagacggggtttcactgtgttaaccaggatggtctcgatctcctgaccttatgatccgcccgccttggcctcccagagtgctgagattacaggcatgagccactgtgcccggcccggatctgacttctttatttgttctgaaatgtgtagctaattatctcaagccatttgctgaagatttgattctttccccattgatttgaaattactgtccactctcatttcaaaatttcagaatttaagtggttggagagaaccatgggcaagttccctggtgcaagtcctcatttagcatatggagataacggcttctccatcaatatgtctcatagtatttctgtcaagagatagatatgaacatttgaataaagaccctgtgtccttatattgacaaagcaacaagaacaacaaacaggactcctatttctcaagtttttgaagatacctgttcatctgaaaagtcactggggtccacggggaaaagtcccaagcccataggtcatgtctgagacatgaatgccaacactcacatgtgaggagatttgggtttggattttggtacaaggcaagagcccatgaagagagggaagtgagaaggcaggcacctatggatggatagaatgtcagcctgggcacaatttagtcctgtgaatttcaagaggacacaaatgccactctcacactgtgagcttcttgaggccaaaaggcctgagtccagtttgccctcaagcccagatgcatagtaggcatctaatcaatgcttattatactgattttaaatgtatttttccagtgggggatgtactgggaaatcagaaggttgtgggaaggggaatacctctcttcttccatccctgctccaaaatattctctcatttctgtatttagctgcaaatgaaggaaaacctgagtaagcatggcttttaaaagagggggttgtattttattttctgtctcactcatcaagaagcccaaagcaggcactcagatgtcatccaggacccgttttttctgcattcttgttctcctaacctttgttgcaaggagataggagagataggaggtggtaaagtccaaaggtttaaaggcacaccaacccaggagaccctaataatctttttaggaagctccgcccagtaagtttcatcactttagctgcagaggaatctgggcaggcaagaactgctggggtgtgtgtgtgtgtgtgtgtgtgtgtgcttatgcaaatagattttggagggtgcattctacagtttacaagatcttataaagaatctgcctcccattagagcagtcatcggccaacctccccaacagcacttgggttttcctgttgagagcggggactgagagacaggactagctggatttcctagaccaactaagaatccctaagcctagctgggaaggtgaccgcatccacctttaaacacggggcttgcaacttagctcacacccgaccaatcaggtggtaaagagagctcactaaaatgctaattaggcaaaaacgggaggtaaagaaatagccaatcatctatcgcctgagagcacagcgggagggacaatgatcgggacataaacccgggcatccaagccggcaatggctaccctctttgggtcccttccctttgtatgggagctctgttttcactgtattaaatcttgcaactacaaaaaaaaaaaaaaaaaaaaaaaaaagaatctgcctcccttgtcgggcacggtggctcacgcctgtaatcccaacactttgggaggccgaggtggacggatcacgaggtcaggagattgagaccaccctggctaacacggtgaaaccctgtctctactaaaaatagaaaaaattagctgggcgtggtggcaggtgcctgtagtcccagctactcgggaggctgaggcaggagaatggcgtgaacctgggaggcggagcttgcagtgagccgagatcgcgtcactgcactccagcctgggcgacagagcgagactccgtctcaaaaaaaaaaaaaaaaaaaaaaaaaatttagctaggtgtggtggttggcgcctgtagtcccagctacttgggaggctgaggcagaagaatggcgtgaacctgggaggcggaggttgcagtgagccgagatcgcgtcactgcactccagcctgggcgacagagcgagactccgtctcaaaaaaaaaaaaaaaaaaagaatctgcctcccagctactctcatgctaagcaaaatggcagccttcttggtgtagttaccccatgccttactgcaattctgcagctcaaacccaagagtggggagcaggctagcagccttgtgagggtggctctggagctgcagagggaaggttcagggatccgggcttgctggactctgggtttagacagcttgttgggcaacacggtcagccggcagagagcaggcaggttgacgatgcaggcagagaaggtgagaccgtgcccatcttggggatgggtgacaactgtcctgatgaagaagcccctccgggcttgactcctatttgccattagtagttattttttaaagctgataacgggagtttcatttcttcttatccaggacatttagtgtgtaaaatagctttgccagcttgaaatttctagtattccctcgaataagcttcctcagctcctaggacagaggcttcctcagaagctgtgctgcaacagaccccaatgcctatcacacacccaaagtgtggccagtttggggtgcaaggagacaggagtctgtgagcactgtattcctctgggctttcctgacattggctttgatagtgtctggggtacttcagaataaacgcctggtgggccagaagtttaagaggagcccgggctggggctggcccttaggtggaatggaacaagggttatgcaaaccggattaagcgcccttccgaggatcatggccggcagacactgcaaaccacagatgagcggaagggctgatctttgggcagccaatgtggaattcccctttgtgcaactatggcaccaaatcaggcaatttggattttccttaggggatggacactgtgctctgtaacttctcatatgagaaatttggcttatcagggaccaggacaccaggtgtttgagccttggccacccagaggaccatagttgtttctgctctgtctgcatgactacctaggataactagtgggctcctgagtgtggggcacaaatggattcttttagctccaggactgtccctctggtgcgctttagtttgctccagtctccactggatggctggcacctccaacccaacatatccaagcagggctgggtttgtagataagtgacttctgcagtcacacagggtcccatgactaaaaaagtcctccccttactctgctaccaccatcttgaaattctcaataactgttgagcagggggttccacatttttattttgtactgtcttcccctgccaatttatgtagttgattctgtatctgagagtaaaatcatctctctctggtttcaccttcatccagtgcaccctcgctcagtaaatggaactatcaattaactctagaaatgatttgttggtccctccctcttccttgccaatctatgttcaatctatcaccagaacctccagatttttcttcataaacatttctctaatctactgatttgtctccatttccatcatcaccagcaatgactgtctggttcaagctactatctgttggtagaagagctgaggcaggactggcttgtctgtcataatataaaagagtcttgggagatgtccggggtccagggtctaaaaccgctcgtggcctttggaacaccaagctctgtgccaaagggtagaaggctgccctgctgcaccacaaatctaagcccagggcataaaatccctcgtggcttggatggaatgtgcacagacttgttggttgctctcccaggctcgtaaacatgctctccattatcttgagcagcagagcatattctatatgtgtcaaagaaaatgctaaaccatcacagctatgcttgatgcaccactacctttctacccccacatcctcacgccctcacctgtttacccccacgtcctcaccacctgcttctttgtttgatcaccaataaatagtgtgggctcccagagctcagggcctttgcagcctccataccagtgttggcccactggacccattttatgcacccttaacttgtcttttctcattcctttgactctgctggactttgtagcccccatggcctagtgttgggtctaatcaccccaacactgtctcatctctcctggactccaaaataaatgccaaattgttattctaatatccattctctagaccgttctccacgttgtagcaagagtaattatttccaagcaccaatctgatcatgactctgttgctacttgaacccttccatggcttcccactttccctctcttggtcaaataaggactcatattctaatgttttctataacttcctttatcatctgacactgcctatctcttctgcttcaacttgcggcactcttcactttctacttccctctgcactccagcctcattgactttcttcttcttttttttcaaatgatccgcatgctctctctctctctttttttttttttaaagagacagggtcttgctatgttgcccaggctgtttttgaactcctaggctcaagtaatcctcttgcctcagcctccaagtggctgggcttacattgcaccagccactatgcccagtgatttatcccctctctctcctatcacagggcctttgcacatttagttctcccttcctgctctcctcctgtcttcatccttcagctctcagctcagatgttccttccttaaatgagttcatcattccccagtctaggtcaggccccctgggtgtatcttctcagaacaccttgctcccacccctctgtagtatttatgtcagtttgtaattagacatgtggctatgtgatcatttgattgacctctgtctctcctgtgagactgtgaccacttcgagggcagggcctgtatctgtttttgatgagtgttgtttgctcagtactcagcatggttctgggcacatccaaggttctcactaaatatttgttggctgactgggcggctgagcatgtgcttcctaaactttttgtagtgctacatggctatatgtctgttcttccatctcttataaagtagaagtagagaatggattcatctgaagaaaccactgtccttacaaactatatgcctatacctattatagcttttccagtttttaaaagaattgatctgattactaattagtgctcttccaggcggatgttaactcctccatggctgctggaatgttaaaattctatatggacgtcagaagaagagggggtcttatcaaattcacgtgtcttcttttataaatgggcaaacagaggcctagagaagaagactttcccaggtcctagaggtagttaatggcaaaggtagaatctgaatgcaattctttttcagatcagtacctaattcctttactcatgtaagtatcaaatcactctgggttctctgggcctgcagcaacaattaggggcagctgtctaagatgtgttcggtgtgtgaggttgtggtggtaagaagttgaaagtctgtgacaataagtttccatccattaaacagttatgaatctattttgtactccttgggtaccttaagtttaggaattgggaatgatagtgagggtggcttagatatttttgtcttaggggaagatttctgccttggagtgttttcagacagaatggtgtttctattttgtctctgatccatgagtgtcacagtgttataaagcatagtttggcctgccttcccactgcagtacccctacaggagcaacaccttccagaaaccttataaaagagaggagaggggccaggcgcggtggctcacgcctgtaatcccagcactttgggaggccgagatgggcggatcactaggtcagtagttcaagaccagcctggccaacatggtgaaaccctgtctctactaaaaatacaaaaattagctgggcgtggtgaggctgaggcaggagaatcacttgaatctgggaggctgaggctgcagtgagcagagatcgcgccactgtgctccagcctgggcgacagagcaagactctgtctcaaaaaaaaaaaaaaaaaaaaaaaagaaaaaaaaagaaaaaaaagagagagaggaggaagttgagcactttgctcagaaggacatcatcctgcccattctggtccttacctctaaaacgtgccactgactctcaatcctccccatactccgtgtgttttgtgcattttggatgcacagctgcatcacacatgaagatgcagttgcttcctcccaccctggattcatgctacttccactatgactgtcatttacatgtgcccctcttagctcatagactaagggagaagggaaagggagtgggtgcgagcaactgcgtccagccttgcccccggttccctaagtcagctgttggcgaactatgtggatccaggactcttttacatcttcaaagttatagaggacccccaaagagctttcacttatgtgggttatatatacatatatatgtatatagttatatatacatatatatgtatatagttatatatacatatatatgtatatagttatatatacatatatatgtatatagttatatatacatatatatgtatatgttatatatacatatatatgtatatgttatatatacatatatatgtatatagttatatatacatatatatgtatatagttatatatacatatatgtgtaaacatttatcatattagaaagtaaaactgataaatttttaaaaatacctcctatgacatctttttaaagtcataaacaataataaacccttacatgttaacatggcatttttaaatgagatgtaactattttccaaaccaaaacacatttagtgagaagagtggcagtgttctgcatttttttccaagcatttttaactctctggcttgatagaagcaggatcctcacaactgctcctacatgcggtctgttgtaatatgccgttttagttggagcataagaattttcccctggaaaagggaagacctctcagggtttctcagaccacccttagagaatgaatgctgtaagtgtttcacagaaatctctgggtgaggacaagtaggaggagaatgatcaaagtgtggcctcagaggcaggtgcagaggatgtacccaaagggcacctggcttgggtagacaagggagaagcctactgctgtattctttattcagagtttccaaatagccagggtggtctttcagtttagcagctcctgtgagcctctcacatgtcacggaagctacagtgcctcacaagcggtgtttgtggtttcaagtcaaaacccatgggagttctggggttgatttgccagtgacctgtcattactgtaaaccccttctccaaggggccccaggcctaggactaggttctagaggctgggtgtggtcaaggggcacagagctgttggacaggctctactgcaggcttattttgggctctgctttcttcttctgccttttattctcctctctccctcctctttaattctaaggggcattaaaaaccctgcttagtctttggtaactcttgtgctttctcagtttttagaacaacattgaaaataaaaacagacatttcctagccccactggccagaatttgtccaattaaatcaatatcattggcttgccattctcgtctcatcccatgcagatttgcctggcacacacagtaggtgagctctaagtgctctggtgaacttagaaatcattttataaggagggcacccttttaggaactgggtcagacattgtgtggtcatattaaagctcaatccctggttgcccacctgattgtgggagaccatctatagaaggaggggaaaaagaaactccttttcccagggtgctggactaagaactccagaggccctaagttgtctcgaccttcagatgtagttcaaaatagtttaaggaggcccaacaaggttctgatactcttttgatgattttaaaagtattctttttaagattaaaatacttaaaatacaaggaatactttctaaacagtattattctttcaagtaattaaggagaatctgtttgtaccttggcttttgggtgatctgagactgttcccagcaagaaccttgaattcaggtgcctcaagcagtgggttggatataaattggtatcaggtagtcaactggtttcacgaaagcggctaagggttgtgcacttgagcctctcttatgtggcagaccttatatacctctgacagcaaaggctggaagtgccttccccactttgctcaacccccagccctaccctgggtccaagtgttctgttattggaaaccccaagatgtgctctgtctttgggcttgtctttgcagcagagcatggtggttaagtgtgagggccctggagtcggactgggtttgcaacccagctctgccctttcccatctgtgtgaccttgggcaagtttctgagcctccctgtgcggcagtatctatatacaattggagatgataattggtgctgtcgtagtgttgcaagggcggaatgagtgactgtacacaatgcttggatgaatacttgacatacagcaagtagccagcccacctgaagtgtagtggttgatgtttttccttgggaatactcagctgctaaaagctaagtatgtctcttcgtggatctgaagacttggaacagaccaatttcaactccaatattctgaggatgttacagggagacagagaagtcagtctcacagtagaaagactgactggctcaggcatttaggaggcctagtttccagccctggaccttctactatgagatcccaaacaagttccttttcatcccttggccttgctttctgcatcaataatccaagggcttgccagagttgtttttctaagaagatttccaaagctaatgcccttaaattttgtgattcccctatctctcctcccagcctgccccttctgttcccctcggcaggagcgagcgaacatgagtggttctgatacatattttccttcctttccaaatccaccaggtcagcacaagaccaggccctgtcagcctcttctagctcatagcttctgcccagccctggaagtgccattctgtaagagaaacaaaaccttttcctccggcagcttttgcgtgtgttcacctgtatttccttctcgcaatcctggcccccagcactttgaggttgcagtttcgttgtgagtcaggcctgctgagagcagtggaaatcagaagagcctccacttggtaggggaggacgtgatgctgccttttcctcaagagcatggccccgggggcggcgggggtgtggaagggaggtggtcaccttccggaagtggatttctcacattgactgtttcagggagaaaagaagattactggaaagccctagaaagcgcttcacatctctttcagaaagaactttgcgttctcaagcaattatctgcaccacgcagtaaaatgtctgtgttgcgttgatgcctgcgcgacgcaggcctatgccgaggaggaagtgttgttggtgtacttggctcctgacgtgggactcagataataaattcccttgagagaggtgaccatgggatcctggattcccgtggcagagcacagtgaggccagtctgggtgctggttcagtcccaggagttgccagctgctacgggctttgaagtattaaagtcccccaatgcctccattgtatcccatgggaaaaggcgagcaggcagggaggaatggccagtgctagaaacaggatatctgacccctgtgaaaaccactgtggatgaatactcgggtcatgcaggctctggatcagcagattcttggatccttgaaggagggtccatgcaggtagacttcaggtagactgaagacccatggaacacaaacatatatataatgcaaaagaacacatacaccacccccaatttagaagtgcctgttttctatggacttgagtggcaaccattggcacttccttaaccgtgcttgtgagaaatcctttacgaaatcaccagcaacttctagagagtcaggaggtcaaatacagtggtgggaaagaagccatgaaaataacactgaaatccctgggtggttctaatcctggaagctgagttcctgtggggctgatctgtgagctgggacaggtggggaggagagtaggtcatctgggagcatgtggttaagcagagcagaaggttagcatttcaatggagggcttacagcccctcagaggggaaagtgcagagggacctccagagagggcagccagggagagggagcagagtgtgacagaagttgacccaagacgacctcgactatttcagatgttgcctgaggctgttcatatgtccagtaggagaaagaagctgtcctttgtaaatctcatagacccccagctcccaagaacctgaactaagtttggtcctatttatagtgtaacccctgctttgtaggctgtgaatgaatcaacatttataagtagagtttctacagagatgttgctccagtttccaaaaaagtgacttacagacatctgtacaaaattggaaagctacctgcaccgaagtgtataaacatatatctggtcaaaggggtcacaggatgtaaactgtgtgttagggaggggtggtgacggggacttggggtggggaagtgaaaggggagggatataggacatccttagagggtatcatgagcaagctggcctcaccaaagctctgccattggaatccagaatcccatgtacatctttaccaaagataccctatcatatctgtaagatggaaaacataatgatacttacctgctggctatgagaaaaaaatgggaaaaatgcttgtcatagtgcacggtttatagcaagcactcaatgacttttacctgacaagccattgcttactctgcaatgactgtaactgtactgagactactacagctactacggccagtactatcacgacagctatgactgttgatatcaccacaatttctctttctcttctgggcttcctgaaatgactgaacatccaaagattggtgcaagtggagggagagttagtgtccccacagtcctttctgtgtgagtgagggttggctggggactacaaggcaaggttcttggtggagtgggaagcaggagcttctggtcactgtgaccatagctggggctgctgtttcatttcaggtaaaatcagagggctttagagtaaacaggaggggaggaggagagactgagttgcagcagcccacgttgagccagaacttgcttctctattggctgcagtggtgggaaaattgaggttgaggctgctattgccactgtaaccaaggtgcgggcctgtggaaatggtgcaagggatgctgagctcttcatattgacctcacccttctccccagtacttcccagcctagctgagctaaaggccacatggaggtttattcagctgtagttactgccatcaacattctgagaacaacaaattaacatgttaaattctgctctccagcccccaagccaccggagaacagaacgcattcttaaagtcttagtttttccaaaccaccaagccaggttcacttttcaaagcactcattttatcagcaaaactccactctcacaaagcccagggctttcagaacacagcccaacctagcttgacatttgcactcccaaatgccttcacagctttccttcccacaggttctctccacaagatctctgaccaaaacacgggggctctcactattgtcagaatatgccctgtgctctcccacgtccttacttccactcatggcttcactggcctgcaatgaccacccttccttttcaccaacagaattctttcaattcagcactgcctcttccatgagccttcctttaacaacctgactccactgagatttcatttttaaaaaaatcctccagtgcttatgaccatccttggcagtactttgtgtaccctgccttagagttgtgagatgtctttgcctgcatggatgcatgtgtgcacatatgcatatgtgtgggtgtattgtgtgtatttcatccctgtggactggacacatgttttatatatgccagagatagagaggagatgcagtctagcttggtgtgaatattttgctcattttgactaaggcacaggtttacgattctcaaatggtaaagacctaggtccgggaaaaggaggcctgggtttcggtctttcttctgtgtgactgtggagatgtcttccaccttcaatgagtcttgatttctgtctctgtgaaatggagagactcctcagttctttctcctgctttacagaggatcaaagagatttgtcaataggttgaaatactttaaagccataaaatagctaaatacatgaaagagcccctctgtggtcttgtctttgactcaagaagggaggctctggtggcttttctcagaaccagcagtaggactaggatccaggagtttctcctctccagccatgccacataccaccaagctacacaatcttttcctgggctgcgttatcctttccactgcaccatgtggtgcagccccatcaggtctcgctttcctttccaccagccacattcatagccatgggaatccgtgtttttcagcaagcttccttctaaaatccccctctgcccagagttcctggggaccctgtggaccttccttccttgtgacatggttggggaaacacactggtctgcagacctcttattcatcttcacgatcccggaggtggcttgagcaatcttatctgttgtgtgagtgtgctcacatgtgtgtgcgtgtgtgactctttgcagctgttctatgactaactgatgccagctatctgatactgtatactgtgtgcccaccatatgctatagactaagacatgtcctgacccaagccctagaccccaagcaaggccaatggcaaactactacctgtcttagttggtttcccctattgctctttgatgtcttactatatacaagacacttcatattgtttcattttaagttttacaacaatctaaagatttgatccaatcattgaatctattttatagtagcgcaaaataaggctcaagtctcctgataatcagttcattcctttacccatatctccatgcagagacaaataatgtgacgctaataattaactttttttttttatctcaagagctttagaggtacaagtgatttttggttacatggatgaactgtacagtggtgaaatctaggattttagtgcgcctcatccaggcctctgacacctcatccccttccctcattgcccctcactgccccaggaccagattagttgaggcagaagcagttggaggtgctagaaaagcattagggttttcaccatctccagaatctgcttagcacatgtctcaacctaaggcagtgcaggcaggatggaggcaagagccttgattccatagcggtttctcttagcacagattccagaaagttgaggatgacatgatagatgacccttgatatctttcttcattcctttttgctaagttattctctgttgtgtggtgcctgtgtgtgtaaggcatttctaggcagaggagctttcctgggtctggtcagttttaccatctcatctgctgatcaagatataaaagatggacagtgtctgttgtttccaccaataatcagataccagtcagaatgctagagtgaccttttccttttccgccttggaaagaaagagattgtttcaaggaacagctgtagggttagatagagaggactgactggaaagtgatttgatgatctgaagtcctggcattccatgaaggttgctctgggcttatagtacagtacgagagatctttgttgaactgaagaagatgctctgaccattagggtcattagacactatggaaccttctcactgaagttccctttttggaaactactaaacattgtacccaacaggtaattttaaatcccttatcccctgcccttctgaggatccagtgaccattataccaccccttatgcctttgtgaatccatagcttagctcccacttgtaagtgagaacatgggtgtttggtttttgattcctgagttatatcacctagaataatggcctccagttccatccaagttgctgcaaaggacattattttatacttttttatggctgagtggtactccatggtgtatatatgccatattttctttttttatgtttcagtagtttttttcgacttttaagctcgggatgcatgtgcaggtttgttacataggtaaccttgtgtcatgggggtttgttgtcttactaataactaatgggtattaagcctagtacccattaattatttttcctgatcctttccctcctcccaccctccaataggcccagtgtatgttgttcccctctatgtgtccatgtgttctcatcaatgagctccgacttacaagtgagaacatgtggcatttggttttctgttcctgtgttagtttgctaaggataatggccttcagctcctttcatgtccctgcaaaggatatgatctcattcttttttcactaatttgttggtggacacttaggttagttccatatctttccaattgtgaattgtgctgcagtaaacatatatgtgcagttagttgtctttttgatatatatagtgacttcttttcctttaagtagatacccagtagtgggattgcaggattgagtggtaaatgtgcttttagttttttgaaaaatctccatactcttttccataaaggttgtactaatatacattcctaccagcagtgtataagcgttcccttttcaccacttccacaccggcatctattgtttcttgactttttaataatggcctttctggctggggtaaggtggtatctcattgtggttcttccaataatttttaaaaggctgaaaaatgtcatcagggcacggtcctctcattgtgccatcctctcagtatcccagaaaaaaaactgagccccatggcacgttctgtttctgtctctgattgtggcctgcttatggtcattccttccccgtctactgcaggggaaggaaaatacccagcacctcccaggtagaaaaagagggaaaaaatgtaaaatgtaaaaacccaagctcggcaactatagaagataaacaacgttgagtctcagtatggttcatcggcagaattttccccagagccaacggcctgtgtcagagctatattttccactccggctactgtgatttggttgtggcactcttggtttctttcattttggtggagacagactctgacgcaagtttaaggctctggcaggtgtctgggggtttacgaacttgtccgggcctctgacacctcatccccttcccccattgccccccactgcccaggaccagattagcggaggcagaagcagttagaggtgctggaaagttgttagggttttcaccatctccagaatctgcttagcacatgcctcaacctaaggcagtgcaggcaggacgcaggcaagagcctcaattccataggggtttcttttagcacagattccagaaagttgaggatgacatgatagatgacctttgatatctttcttcattcttttttgctaagttattctctgttgtgtggtgcctgtgtgtgtaaggcatttctaggcagaggggctttcccacatctggtcagttttaccacctcatttgctgatcaagatacgaagatggaccgtgtatgttgtatccaccaataaacagataccagtcagaatgccagagtgaacttttccttttccttcttggtaagaaagagattgtttcaagggacaactgtagagttagacagagaggactaattggaaagtcatttgttcattatcaggatggagctgggcaaattcccagcagctctgctgctgggtatgaccaggaggtccttaggtttttttttttttttttttagatggagtttcggtcttgttgaccaggctggagtacaatggcatgatcttggctcactgcaacctccacctcctgggttcaagcggttcttctgcctcagcctcctgagaagctgggatcacaggcgccggccatcatgcccagctaatttttgtatttttagtagagatggggtttcaccatgttggccaggctggtctcgaactcctggcctcaagtgatctgcccgccttggcctcccaaagtgctgggattacaggcatgagccaccatgcccagtccctatgttttgactttggctgtctgcacactgtgctcagtcccaaagcttcctgtgccccatgcccagccccagtggcctctcactagcgttttggctttcaaagcctcagtgtggtttccttcaccaaaacttcaccctcatcagaggctcctttctcctccccctgtaaaagccccgttttcttaaaggtaactggccaactgaacacttttaaaaataggttgtaactgcacctctcaccatcccagaaaaagacttgtagttttcactggtaatatcccagacagggtgtctaagtaaattggaatgttcctggtcctgtgcatgtgtgtgtgtgtgtgcatttaactgtgggtggggaggccctgggtcttcccaggctggttggatttatcatctcttctgcctttcccaacatttaagatgggcagtgccactcacgggcagatgcccacttctctggaattgccccatcctggtaatatttgtggcttctgaaggctgagtctgagatgccttctcttggttccaagattctgagaaagcctggggaacagcataaaaattccaccctggaaatagtatacaagcaaaccaactgcccacccacttcctgagtgaacattgctgagtgttcctgagtcaggggcagacctaaattccttaaccatctttttcttccctttcccaacctggcacggcctcatacccctctgcccctccattaaaggctgtatttatgagcagtgatggatgctccctgacagggccaccctagaaaaaattgtgtaatgacaaaaacatgatgctctgattgaccctttgtggtttagtacattcacaatccccccaccccgcctttttttttctgagatggagtcttgctctgtcgcacatgctggggtggaattgcatgatcttggctcactgcaaactccgcttcctgggttcaagtgattctcctgcctcagcctcccgagtagctgggattagaggtgcatgccaccacgcccagctaatttttgtatttttagtagagacagggtttcaccatgttggccaggatggtctcgatctcctgacctcatgatccacccgcctcagcctcctaaagtgctgggattacggaagtgagccactatgcctggctagatgtatgtacctctcttaagcccatcttataggtgaggaatctgagttcagagaggtaatgtgcccaatccaagcctacacagctgataagtgtcagaaccaggattgaatcctgggcagtgtggctgcagaggccacactctgctgtcccttaacagagctatggggaactaattggcatataattagctgaaatgaagtacttcgtggtgcctggcacaaaggtaccacaataaatattagttcccttgccccaagaatggtttgcattttaatgactgtggaatgaagggctttcaggatccattagagttagaaggatttgcatctgagtgcatgaatgcgcttgtgggacacccacgcaagccactgacaatcctcagggttggtcagccccatcctcagaggtttatacctggagctaaatcccgacggggacttctgccgatgacttttatagcttctgacatttcagtctcttcatctcagggagctggttctctgaggactttgggggtaacagttttaaaaataatgtaaggcagctggtgatggctgctttaggggcagcacgtgagctgggccccaggaggggaaagccatgaatcaggggtcatgtagcaagacagggctttcctacgggctggatttggtcagcatgggcccctggttcccttgagggattccccgactgtgcggcctggcagtcgtgctctgatcgaatgcctccgattcccccagccggcctgactcaccctgcatcgctcagacctctgtcaaggtgctgctcggagagtcaaagaggctgcagcaggcaatccccttgcccactgcaaggctggttgggaggctgaacaaaatggcacatcctctcaagtccagaaaggttgggccttcctttcaccctccattttatgcctggaacctcaaacaacagaaaaaaacacgaggcagaaaaaaataattataataattattaatgctttctgaacctctaacgccactcgattagtcacagtcatagttcgagtgcttgttatgataacacctcggtggcttccttaactgttggtagtgattaatggcatcatctggtcgaagggctagggaggagtgtgcctgttgacaagaaagaggggctgagtagcaggggaaggagagtggggacagggaggtgtgggtggaagcctgggctaaggctagcgttacagcacctgagtcaagagggcagatccctaagttagagaccaccacttaatgttccaaagacatctagggactcctgggtcatggctcttcaggtggtggatgggcaatgttctctagtaccttggacaccatggccaggccaatctcatttcatcaccatcaccttcaagttattccccagtttggtcattgggagagacttctcattggccaccagaacaactctaaattcatatgaacctttcagtttccccacctgcaacttggaaataaagatactgctgctcttattgggaggataaaatgaaataacagatggaaagttcctggcacggcatacagtaggcactcaatgcgtggtggtttatttcactctatttctgtctacggtccgtcacatcttacacttcattgtctgtcacctgttccatgactcctgccctgcctcccacacattcactgattcccatgaccccgtgtccctcctttgtgaagcctcttcccactgttccagctcacgtcgacaccccctctctgagctcttatactatggttggccccgggtcctcctgttgggtcctccctacttgtagcatgggtgtaagtttcatcttctcacgtagattttagcttctcaagttcaggaactgggctcattgcttcttttgattctcatgcctgacaagtcacaaggtgagcaataggttctttagaagagacctgcgaggtgggtaggggtgggtgtgtggcaatggaaagttacccaaagtaatggggaaaccatctggggcacttctgtttggggatttccctggaccacattttgtgacctgtaccaagcccggtgctttgtcaagctggaatcctgctatgctccccactttccatacctatttctgcccatggcactcatgtgaattggcaaaagtgctgtgggatggaaaatattggaatctcagggaaaagggtcagtgagtgcatccttcagggcaggatgtggggtcccaaaactgctttgtgcctggcagatcacccaaacacttcctccatttccccatgccagctaaagcaaccttggctgttatgctctggcccaggtgtctttcagggcctttcattctccacacaaaaagcttaggcataggggccagtctagatccagacacaagggccagctggagaattgggaagtacagtaacacctggccaccaaggctggtacagttcagcctgacaacagtctgagggcagtagtctgttgtgaaaggggacagatatgtcaccttgaagctgcagcacttttctagaccaagcccaccttcttgaacatttcagtctctttgcatccagctgggtgtattctgtcatatacacaagttgcctttggctctgaggctgctttataagaactagtcctggatggtgtttggtcagggatgaggtttgagtttgctcagcccaagcaggtatgcttaaattactctcagattggatgcctcaagagcctggcctactcctctcctactgaccatctgttttctactcaacccaagccaactcaccatttgactccttcccacacctttaggattgtgaactgtagaatgctggagttggaaggagctgtagagactagctagtctaccttcttcctcattctatggatgggcagacagacccaagacttggggcgatttgctatgagcttcttacagcctctgcatactacacatggataactgtttaccttcctgctcctggatcagagcctgccctcaagttatcccccatagcccactcttgttccatcagttgtgtctgaatcaaagactcccttctttttattccttctattaacagccttaaaactcaccttccccaagaagaagccttctttgattaattcagttcatttttgtatgaggattttccagagaaacagaaccaatataaatatatatatgtgtgtgtgtgtgtgtgtgtgtgtgtgtgtgtatgatttattataaggtataaggtatggctcacatgattatggaggctgagaagccccatgatcacctgtctgcagctggagacccaggaaagccgatggtatagttcgaaggccagttggagagtcccatggtctagattctagttcaggtctgaaggcctaagaaccagaagctcccaggcaggagaagatggatgtttcagtccaagcagtcaggcagaaaaggggaattctcctttcccctacttttttgttctactgttacgctttgtagatcagaccatgcccacttacactggcaggggcaatctgcttcactcggtccacaacttcaaatgctaatctcttccagaaacattctcacaggcacacccagaaatcatgcttaaccagacatctggaaatcctgtgattcagtcaggttgaccataaattagccatcacaatcctccattctttacgaggctggtggcttgtactatgttaattttcacttaccattgtttttcccccatgagttcctgtaggattacagccatacaccaagtaatggtgtctgtcaataatggaccacatatatgatggtggtctcataagattatgatgctgtattttactataccttttctatgtttagatatgtttagatacacaaataacctaccatcatgttacaattgtctgcaatattcagtacagcatcatgctgtacaggtttgtagcctaggagcaataggccttactgtatggcctatcttattgtgtaaatacactctatgatgtttgcacaatgacaaaacctcctaataaggcatctcccagaacatatccccaccgttaagtgacacatgactgtattttaatgtgttctatatcaccttcattagtctggcagcttcctccaccattctgggaggcccagacagtaatggctgtcttgtgatctttgtctggattctcaccctttgtccagcccaggactacagactcagggatgttcacagcccagtaaatgggaagtattgctcgaaaaccggatcacaaagcctccttgtgctgaggctggggtaagacttggaggaagaagaaccttccctgactccttcgctggggtcagcctctaagggtcagggctcactccctgcagtgtagagactttgctgcgggacaggatgtgaacatccttggcttttgcatggtcaagttaagtcacttgtccggggtcatagtgacacaatcattgccaaacctgttcatttcaccagggccccatgggattttgccaagtcagtcctcctttgtactttcttgctcaactggtgtagaattctcaggcaggaagggaattcatggcggagggtggggtgaggtggaggtcatgtcgtacatcctcctaagcagacacatggacgtcagaggcaccagagggtttccacattgacctgcagtcacccatttacacatcccccacctccgagagttcaggtattcttgcaaatgtctccatttctgctactgtagcttatcctgagccctttactgtttttcctggaaaacaagaaaatgtttgggaatttgtatattgggaatgggcaggtgtctacattcatttgctttaaaaaattatttgaaacattgccctttaaatggaaaaatcattttcctgatcttttttctcaaggacatttcctgctgcctcctccagacctactcttatcactcacaaaccctagaggttccgtggccaaaggaggacagcagctggccatttcagactatgtccccacagggatcaggactccctgggacatgatgggagtctggagaaggtgtcgtggttggcaggaagtgccacattcagggatattgacttctggctctttctccacgtgactatgagatgaagcaatttctgaagagggttaagataaaaaccttagatgtcatccaacctaatccctgattttacaggcagaagaagtggatttcagagctagctagtggcagagccgtgactcacaggccacagacctcctgacaggcagtcctttctcagagagcccagcaccttctgtgtttggttgtgttgaggtggagttgaaggaggaagcatggcacacctgctgtaggtcatggggacagatgacattccccagacctcttgctgcctagttcctcttttaattttttttgagatggggtctcactatattgcccaggctggagtgcaatggctcttcattcataggtgcgatcatagtgcactgcagctgcctagttcacattcttcacctggcccgttgttccatccagtcttgacctcgctagcctgcagggggcgtgtgcaagcccacactacagcccaggcatcccctctgcaagggaagtggtgctgttgtggacctgcagtccttggggggcttcaatttgtatagaaatgacaaggacagagcaaaggaaagtgggatttaattttaagcgcccaccttcccacccccaagtcaatttcctgtgacgctaataaaagcttcaggatctcttactttcattagtcctttccacagccaaagtaattatatacacatttttttttcttaaaagacagttctccctcccattatatatgcctctgggccccataaaatctggccaccctcttccccgacccgatttaccaaatgtcagagtcccacagcgcaccgagaaacaccactgtcctcctggagctctcccacacaatacaggccttgactgagggtgtgattcggttcagagtagctgggttgaatttttgtaaagaggttgccgtgtgtgcacttttgccgacctcaaagccaccagaaggagggagctgagtgtacctttttgtaatgatgactctctatgattttctccatagagcggtgcttgcacacactgacaggagtccaagaatgtgcactgagggagcgtttccgcacagatctgcgtgttccttaccactcacacatgtgcacacacatatccatgtgtgtgtgccagtgctttggggctctgttccacggggtaagtaatttctgctatagggaccctggatgtggagccattctctgggaccagagatatccagtttatttcaagactctggaagactgggttttcagacacctatgaactgacaggactgcctttgtctgtcataaagttccttattgccagactgctggccaggtttaggggagaagggggggtcaccatactggagatgctgagggtgagtgagggagtgtagggtggaaaggcagacaaataaaccatatctgcataccccttccccatcagctcccatactggtcatggcccatttcttcacacaacaagagtcttcaccaaggttgctagctgcaatggtacagtccagctagctgcagcaaaaagggggaatttactgtaaggagcctggggtgtctcagaatatccatgggatggaagctgctgcacgacacagagggactggaaccaggagcagaagtcatcagaaagccagaactcagcttctcgctctctgaggccacgtagtcactcctttctgcttttcttggcagctttctctgcatctctgagcagtttgcagaggactgcaactgcacagctctagaggctaccagtctttaattcaagggaccagccaagactgactagtgctctaaagtcccaagaccaaattactgggagacagagactaacagaacagcttaggtcagttgtccactttccaatcagctatagccaggagaccagggtcacatggctgcctgtggaccaaggtcagggtggaaaacatcatcaatggtgtcccaagttaaatggcttgtcctctgtgaagaccctctgatcaatcctatggaggaagtgacctctctcctgaatacccacagcactttctcttcttgacatgtattgctttctatcttgtgtactattatttttacaaacatctcatcccctctcccacttatctataagcaagtttgtttatctccatatatttcacagcttgcacaaaaaaagatatatttaataattatccaaagtcattgataatcttcagataaatcaattttcaggaacttaagcaacttggccaagtgtttcatttcactgaattgtccaggcttgattaaatgcaattaattcaaccaatttttattgagtgccttctacacaccagactgctgaggacacaacactgaacaagacaaagtccataccccattgagcttccagtgtagtggtgaagaccatcaatcagtcaacaccgtttcctctaaactaggctttcagctgggtgccaaggatagaaatgtgtaagtctccagcattgccctggaggagttgtctccctggggcagggcagtggtggtggggtaggggggaaggtcacagatgaatgctccgatatgttgctgtgcaacatgacagtattattagttaagggttggggaggaagtgccgtaagaccccaaagagagagtgatttaccacctggaggaggagggtgtggtcaagggaggttttgctaagaacagtgacacatgactgaacttgaagggtgaataggagtttgccagggagagtgggagttgagtatgtgagtgtgcatgtgtttaggaaaccgggatggggaaaggagacaggaatgatggtgatcaagcccttccagatgaagtcatttatctggaaaaagattttaggcattgtgaaagagctgctgtgtctggaggaaggtgagacatttagtatatctggaacacaaaaaatatggggaaaagaatggggagattggccctggcccctcctggccgtgtgtgttaagtccgggaggcagtgggtaagtagccactgccaattgccttggggtctggaaggcaatgatgttggctgggcatgaggaccaggcacagcctggagaccaaccacctctggccagaaacatattccagaaggccttaggatgagacattactcctgcctgtggtcgttgacctctggcttatggagcgagatggctgcatgctgagattctggtgaaatttgtcactcccaaattgcaaccttcctcagaaagcactggatcttctaactttcactctctccctagtagagtgggattttctaaattttgcaattgaatttaagaaatcaaagaaagttgtccattcgtagtttaaaaaaaaaaaaaaaccacagatgtctgcctccagacccctgtgtcctttgaattacaagcctgtagcccatggccttctagccaatgatatgagtgggactagagatgagggatttccatggactgctcctgctctggaatgttccttggagatgacagatctgctctccactgtcctcatgtgcctggaggcggggggtggaatggaggcaacttcctggacctttccctggccagactcaaggccattggcacctggtccttgtctctttccagctctgtctctgtgccctccccattcctggtcagcctccagcactgttggcccaactgcctatctcagacctctatggctctgggtcagtcttagacaaactactccctcttctctccctgtcaagcatcacttatccttccggtcaaagttctgtgtctctataaaggcttctccatcccacctgagtcagacccaagagctccctcttctgtgctgtcccagcacttttgagtcacttctattattacccccacttccttggaggacagttatctgttcttatgttcatattgttcttatgttcttaagtagactgaatttcttggggactagaccttaatcatctctatatccctggtcatgagcaacagtgcctgacacatcacagactcacaatacatactctgtttgtcaatgaagggtgattacctgggtatcttgactgttgggattgaggtaggatgaaggcagctttgggaagaactccagtgagcagaaaaagggaagggacatttgggtggaagaaacagtttgaacgaaggcacctccatagaaaggcatggacaaacatgggagcttgcaggaaaggaggggaaggggaggctgcagcacagggggctcccagcatggtcctgggctccttgtgtgcatcagtgaatgcaccaggcctttgcagaaacttgatgtattggcactgatccatagagaagggaacagaggcccaggaaggaaggtcacacagcttatgagttggtgatggagatgggattagaccattccattagactttaaaacacatggcttattggggccctagagaacacctagtaattcaggttgcctggtgcctacagtaagtcagtaggttgtgagaggaaaggtgtacatgacagaattatattattcataatatctgggtggtttttttttctgccttccatgtaccaaaacctgggctaagcatttttatatattacctcatcaaaacgaacagcacctttatcaagcgattacccctattttacagataaggaaactaaatgtcagagagttcaataattttcccaagatcacgaagccaataagtgatggagtcatgacttaaattcaggtcttttggtgacacaacccagactaattgggaaagagcttcatgggtaaatcgtgagtcatacttaatttcaattcctggtgacataatgagggtacaaattttcaattttttttttcttttttttttgccatgggcaagttccaagcctgggcttctcttccaacactgtccctcccttccctgtatagttctgctcacttgtcctgtcttcttgctctgtcctctatgcccacatgtatagaactggatccccaatcaaggctaactgctagccttaaagaaagaccaatcttctggcagataagaaggactgttaaggaagacgaggggacaggaaagcaaggggaatgtcaaagaaataaggggcctggccaatatctcaagaacagaagcagctgtggccctggaagggcgagggggacgtcatttccttttccagatcccttttttcctttgaggttcagtcccaaatgggtaaagttcaaatactagtcttactcagaattccctagtcctgcttgctcaaaaggtggattttctggcctcactccaatcttcaaaacatctttttgtggggcttgagagtctgccttttaaaatagcaccccagagagtctacacattgagggccttggcttctgtaatgcagttacatccatgggctttcgctgttgctgctgagagaacttggggtgccaggaagtcggggttggatgccttccagttccctgccctaatcagaggcattgacctggaggccctgtgtaggagtccccatctttcggaattagtgatgtggttagagtagcaacgtgactctctgtggacggaagaaggtaggtcggatgtgagagtctccctccatgaacatgtgtgcgtcatctgagtcaaagcttgtatctttactctcaaaaacaagtcatttttgttcctgtcagcatcttggccagcccacaacaaagagtacaagctggatgcttgtactgtgctgcgataaagaggcccagacacaggcctcaggtgatcctacagagcatggctggagagaacaggaaaggattattcccctgggggctgatggggctgccttcagcaacacaaaaacatgcttacagaaaactgctggaggacataggagtgatctgcttgcaatgaggtttttcaaccaccaggaatggggtgacctagtccagagccctctaataaagtgactttcaaactgactgcacttcaaaataatcctaagctttaacaaatagagatgcccaggcttcatcccagatgtacaaaattcaactctcagggacagggtctgggactctgtgcaaagccccctgggaattctggaacaactaatctggcattgctctaggaaatagcacttggaaagcactccagcaaggtgggagggaaaattattccagcttgaacactacaatatcaagtaatcctttctctcttcgccctgtctcttcccttccctttcttgctctctgtaacaggcaggaggctcagaagagcttcttctctcacgcttcttgcagggcagtacagggaaagatgtagctgtgtaaattccaggagggcttcaggtatatttaaatatgggttgcttgccacattcacctgcctatcaagtttgcagatgacaactgcagaatgtggcacccaggtcttgaaagtcatgaagcagaattggataacatctgtccgagtcatgacaaagagggttcctgtgctgggagtgggggctaatgaacctggagatcctttccaacacagacattccctgatgccaatgataaccttttcaaattgttgttttcttgatttttatctgtttctggcacctcatttgattccctatatgacaataacccccaggttgagtgcactgaaataatttaggtaatgagaagctgaaagttactacagatggaaggaattagggtgtataaagtgtgcattgtgtgagtcataggctgtgtctttaagcaacaagcttttattggtgtcagcatctttccaggtacaatgcaaacccagtgagaatgagatttggggtttaaaagtgtttctgaccagagatgcctgagggaatgacccagggatcaaacagagatgcaagagagcaaggcttcaaggaaactcacctcagcctgtttcctcaactgctttccgcacctttgtttgcgggtggaagaatagaaaatgggcttgaatttttcaatctaaaattctctgttcaaacctgaaattctcttaccttataggaagagcagctgtatctttcaaggatagaatgggtgctaactgcatgggtgaaattatctgaatcccagagaaatgctctttagaagaatccaccagactccttcctttctaaatcatacccttctttgaagttcctttcaatccttggatcctctgtggacactgttctgatcattcaagcactaaatgatcacctgctacctgctgtctgcatacctggctctgcttctagagtacacacctgtatcggcacaatttatttagctattagtcatgtatgtgtttctgatagctctcagttagctgcctgggatggttatttacctttttgtgctagttttaccttctcaatgggactttgagcaaattaagagtgaaaacacatctgtactgatccgtttacatgtccaataaatagattttagtgccaacttgtgcagccattgctctaggtcttgatacagatatataccaggtggtagaggctataaagacaaagcaggctaaggggagttaagtgatagattcaggaaaatcattgagctgaaaaatgaataataacctcattcacttttttctgtttatcaaagaatgccatatgctagatgctaaaacaatttacatctgtgtgactagagcaagccattataaaaaggaaacaatccaaatggaagaaatattttatcaggctggaaaacacagttattgaattaaactccaaaatggaagccatagcttacaaatggacactgcagaaaactgaattaatgagtaaaaggcaaactgaagataaatttcctagaacacaaaagcaaaagataaagaaatgaaaatgaaagaatagagtaaacgtgaaatacagatatcaaagagctaacctacacataacaggagttcctaaagataatgaacagattcttttggagcagaagccatatgtagaaaatataatggctttaagtaaaatcttattttaaaaactgaatgcgcttactgtattcatcaggagtctggatcgtgtcaggctcagttcaaaccagcttaaacaaaaaaggaattttgctggctcacttaatgaagtccaagggttcactaggaatccatccctgctgctcttgcttttttctgggttgccatcattcttgggagggttgttcctgtagggtgacattcagtatctccagactcacattctcccagtttaccaatcccagtggaaaagagagttctaatacatgtaccattaaccttgggttaatcctcgttgattttgattggcttggcttgggtcatgtactcacccttgaatcaatctatgcaattgagaagcgttgttgccttaatttcaccggcagcacacacccactcctgggatgagaggatgggtcagctttacctagagtcatatggactgcaaataagggaaatatcatttcccagaggaaaatggggttgctactttcagaagaaagggggatgaatgctaggtaggctaaataacatcacattggcagatagaaaagagctactactctgaaatatattcaggtagaacttttacatctaaaatactacaaaaactcaataaataaataggcagggagaaaacaagtcaagcatttttcagatttattttccataactctaaatgtgagaagacaatgaaacaaagtattttaatctgtgaaggaaagaagttgtgtgacctgagaattctatgcctaggtaaattgtcactcataacgtatgcactcggaaaatacaattcccggaactctccctgagcaagccagtaaaaaatgtatcacaataaggataaattagagttggtacaaattatcacccagtcctatcattctacctctgaaatatattacgatttggtcccctttccactatcaatctggtatcgtgttagtccaagtcaatatcatattttatccggaccactgtcacagcctattaagttgcctgtctcttccactctcaacccttctaagccattttgtacatgtcatccaatggtctagtaaaccagatcatgtcacttccttgcttaaaataattttaaagcttcttatgggtattagttcgttctcccactgctataaaaacatacccaagactgggtaatttataaaggaaagaggtttaatggactcacagtcctgcagggctggggaggcctcaggaaacttacaatcatggcataagtggaagcaaacatgtccttcttcatatggtggcaggaagaagtgctgagcaaagagggaaaagccccttacaaaaccagcagatctcatgagaactcacccactattatgagaacagcagcatgggggtaactgctcccataattgaattacctcccaccaggtccctcccatgacatgtgggaattatgggaactacaattcaagatgagatttgggtggagatacagccaaaccatatcctatggcatgtagagtcaactcaagttccttactatgaccttcaagaccttgcctgattccacctctgcagttattcccagcccagccacactatcctctactcaccatgctatagtcatatagccactgatcagttcttgctgtgcacatgctaagctccttcttctctcagggccttcactcatgctgttccctcaacctggaactctctcccctcaaccctttcttttcctggctccttctttctcattacatctcagcttacttatatcacctcttcagatgttctctggtctcaaaatctgaaaataagtttcctttgtttttttggcacccttatttcagaccactaatcacaaattgtagctatatatttatgtgtttagttgtgttacatttgtcttctcttagagtatgaaccccacaaaagcagggaccatgtttattttatttgtcactgaattcccaggtcttagcactgtgtatgacaaagaaatggtgtgcaatttatatttgtaggaggaaggcaaaaagaaacattgaaatggtgtaactatatatagaagcaaatatatagaaagaagttatgggaattgatttaactataatttctaaggtgatggtaaactttttttctattaaagagatgaactatgatgttaaaaaatggagcagaaagcatatttaaaacagtaaataaacacattcattatatagtgcttttggttcctaatttggtgccataaaaattgatataggccaggtgtggcagctcatgcctgtaatcccaacactttgggaggctgaggcaggcagatcacttgaggccaggagttcaagaccagcctggccaacatggcgaaaccctgtctctactaaaaatacaaaaattagccaggtgtggtgatatatgcctgtaatcccagctactctggtggctgaggcacgaaaatcacttgaaccctgaaggcggagttgcggtgagccaagattgcactactgcactccagcctgagaaacagagcgagactccatctaaacaaaaataaacaacaacaaaaaacaaaccataccaaacaaaagatattgactgatgtgatgtgaagctctgagagtagaattaaccgtgcatgtagagtgactgtggccttgaaggaaggatagaattcagaaaattagggagaggtatgaagggaattgtgtgtgtgcgtgtgtgtgtgtgtgtgtgtgtgtgcccatgtgcacgcatggtggggtgaggtaggaaaaaactaggtgagcagagatctggcactgagacagagtaaatggagtgaggtgggagggtgaggagcccctaagacttccaggtacaagaaaactcgcggtaggttaaactcacagagggtagtgtagaaagtgttgccatgaggacaaagcatccaccttagaggggcttgttgctatgtatgtgtgcctgcagttgacacaagtcttagcaggagtcctaagaaaaggctcccagcccatttggtctgtggacaataaggaccccttgtggtgcaacaaagaaggtgagagacagatgtagtgaagaggctgcaggggctagagatgctggccaggaaaggacagcctgggtgggacatcatgagtgaagagggtgcatgaggattctgtatgacagagaaggaaggcagaaggttctggaaacaaacttgtactactccccatgaactcaaaagcaggtcttgtttagggagagagagcaaagctgctctctgttcttggcaaacagtctttgtatatgttgatcatgatgtccctcaaagcagcccccatgggtgttgcccccactgcttcacctaggagctgtgaagagtggtagatacagcattcctaggcagcagacctgggctggaatacctgtctctgctatttgctatctgtgtaaacccaagctggttcattatcttaagactgctctcatctgaaaggaagggataataatgcatgatttccacatacctatgtgagatctccacatgtgataggctttttagtctgtactgttagttgtacttggtgtggggtgggtgggcatgaacttcagaagatgctgtctgtgggcctgacctccactggcttttcctgcaggtcttcactttagctcagcttcaagggaagactctgttggccaactgggtagaatatttctctgcccagcccacagttctggtagggacttcaaaagatgattttatactgcaccattgtagactgaaaaagtaccataccaacctctgggcatctaactagttttaggaaaaccaccagaaaaggtgaatctgccctcttgatctactgtaagtagcatgtaaagtataaggcgggttgtgcaattggcactagatggcactgtagcagcctgggtgcattagatgagacctgcttcaaacaagaaatatagtagctgggaggtggggttgggcccaggataatgataaggacaaatttccattaaatgacttgcaagatactgtccttcatttataatgagtctgacaggaacttccccagattcatcagtagattgcatgttgcagctcagcaatcaccaccaggtgtggaatcaaccatcccaaccacgtttgtgaaaaaccttataacaacttcacttggggcagtttccttcaagggaatgaattctccttctcaagacccatcccaacctctctttattgccacttgcctcaccattagggtcggatctcacccttctttgggggttggagggcatggacaaagtccgactcagaatagtttatacactaaaagaagtgcaagactttactaataaatactggcagaatcttgggaaatatgtgtgagaatagattctaagggtgttagaccaaggaggatagactatagcactggattggattgaatttattgggggtatttatgagacattctgggtttagtgagctagctcttgtaactggaagtggctctaaaatttcttggttggctgactaaaccttggactcaatggtggcatatgttcaataaggctggaatgccagaacttccctgacacaatgtagaggaaggcatccaagacttaaggaggaaggaatgatggagtgactttatcacatgaaatctctacatctaccagcctcacatccatcccccagaatgcctagaggacaatcctttcataaagacattaagaaacacattgacgaaggtagcacttgcatctctgaaaagctctgtggtggctgtcttctataagccaggtatgatggtgaaagacacctccattgagttgaatctctgattttaatagaaatgatgagactcccatatagcagaggccaaatgctataatttaaccattagagacaaggggactgcaaatactgacatagtttggatgcctgtcccctccaaatctcatgctgaaatgtgatccccaatgctggagttggaggtggggcctactgggaagtgtttgggtcagggggacagatccttcatgaatggcttggtgccctcctcagagtaacgagtgagttctcactctatttgttcacctgagagctagttgtttaaaagagcatggcatctctcttgcttcctatctcaccatgtaacatgccccctttgctttccaccatgattggattcttcctggatccctcaccagaagcagatgccagtgcaatgcttcttgcacagtctgcagaactgcgagccaaaataaacctcttttctttataaagtatccagcctcaggtattcctgtatagaaatgcaaaatagactaagataaataccataaaaaacagaaagggcatagtgataatcaaactgttttgaaacctagagatttttagtgaggcgaattgatcatggtgcatctaggaatgaaaaagatggccagctactaaaatgtcatctgaactatataaaaagtttggtgacccccacctctactaaaaatacaaaaaaattagccaggtgtggtggcaggaaactgtagtcccagctactcaggaggctgaggcgggagaatggcgagaacccaggaggtggagcttgtagtgagccgagatctcgccactgcactccagcctgggtgacagagcaagactccgtctcaaaaaaaaaaaaaaaaaaaaagtttggtgaccaaaaacttgagctgcctttcattctatttccagacctaggccagttccagacttagaatctcttgattgaaggtggacaaatgacgcatcctgtggatttcagttaatatctttctccagctattcttgtgcttgctcaatggccctgagcataaagtggccataatgtcagggatgaggactatgcatggatttaacaacatggacttaccctagtcaaggcttttttgaataccaacactgctgaattcctagcttgccaactaaagtaagcctctgttatggtacaactccctaaaagtcccagccagcccccaggggcagattgattacagtgcaacccttccatcatggagggaaggaaaaatgtttccttagtgcaggagatatgaattctgagtgcagatttgctttcctgtccaaaaatcttctggcagctgtgactacaaaatatggtgtactgcatacaacatttcttctgatcaagaaagtaatttcaaaagaactgcagcaatgggtttatgcccatggaattaactggtacaaccacatatgctaatccccagaagcagatggcttaatagaaagatttgatggtctactgaagattcagttatggtaccagttgggagattacagtctgaagggatggggttctacattacaggatgtagattatactttgaatcacagaaccaactatatggttccatatttcctgtagccagactacacaggtctgcgaatcaggggtggaagagggactagctcttcacactctcacatctcatagcctactcacagaatttttgcttttcatccctgtgcctttgaactctgttggtttggagtcttggttcctaaggaacaaatgtctctaccaggaaatacatcaatgtcccattggtttggaagatgagactaccatttggccatttggggatcctcatgatgccaaaccaacaggctaagaagaaggttactctatgactggggcgactgattaccaaagtgaaattggattgctgccactccatgggcccaaagaggacaatatctggaacccagtgggattttctggggtgccttttaggattttcatgtccaatagtaaaagttaatggaagatgaccacttccccagcccctggctaaaggcataaccactgatgattcagacccttcaggccagatggattaccccaccacataaaaaaccccaaccgtgtgaggtgctggatgaaggcaaaggaaacataaaataggcagtggaagaaggaagttataaatataattatggcctcatgactagttagttgcttactgtgtgtatttgtatatattaattattttattctttcttcttattcatatcattttatacaggttttgttggaagttaactttgcaatttggtttttagaaaacatattcagatgggactgtgactgaatttgagaagtaattcaaacggatacaatgacttgagactttataatcctgaatttggggagaaggtgatgctcgcctgttttatatgctgaatagttgcattttgttgggaggaaatgaattgttttgtggttgtataaaagttcaaatttttgtggagcagtgtaatggatgctaaatagccaaaggggtggactgtatcagttattgcctctcagttctaaacccaaccttctatagtctgctttgtgatcctagagaccggaccctaaaaaccacatttctgcattgccagttggctctgccaataggggcactagctggagacttcaaagctggaggcagaaaaaggggttttctccttcctatatgcttcctgagggtttcccgtctgcttgtggttcctgtgagtgttaccccagagaagctccttcatcataactttttttttcccttgtagcagcagctaaatctagttttcagtttttctgacttgcagaatcagcttcagcatgtgtcccttggggacaccagcaatagccagccagtgtctcttctgcagagatttggatcctaataccctggatccctccctgtgaactaagacaacaagcactggccaagcaatgcctcttacagatctgagtttcagttccttggggcttctctactgtttctaatttttaataattttaaccttttctctttgcctcttggctctcagcagttgcaacctttatgatattttagagttctcttttaactttttttagttactgtggttgttagttttatatatcagtttggcttggctgtagtacctagttatttaattaagcactaatcaggtattgttgtgaaggtatgttgcagagctacactaaattgactttaagtaaaggagatggccctcaatagggtgggcgggcctcattcaatcagttgaatgacctgaagagcaaaaactgaggtttcctggaggaagaagaaattctcaagactgcaaattagctcttgcgtgacagtttccagcctgccaatctgccctacaggtttcaggcttgctagcccccatggttgtatcagttaatttcttgaaataaatctttttatatatagtaagagatgctggttctgtttttctgaagatccctggctgatatagttatctagttagtatctttgtacctatttgcatatatttaaaaaactgttgtggtttccatctcctgattgaactctaactgattcaagcaatgcacaattggaagttttcaataaagactcctatactaagtgtaagtttgaacggcaattatgagcacagattgcagccagtaaatattaatagaacattgcttaggcagagaatatgccaaacccaagtatgtagcttagaagagcagcaagagaaaatggttaacacatagagcaggtaaacagcattctgcagaggataatggagggaatcagaatgctttgggcctggcgtggtggctcacacctgtaatcccagcactttaggaggctaaggtgggcagatcacatgaggccaggcattcgagatcagcctaaccaatatggcgaaaccctgtctctactaaaaacacacaaaaaattaaccaggcatagtgacggccccctgtaatcccagctactcgaggggctgaggcatgagaatcacttgaacctgggaggtggaggttgtagtgaatcgagactgtgccactgcactccagcctgggcaacagagtgaaactctgtcacacacacacacacacacacacacacacacacacaattcactttgaacatatgcagagtggaagcacgactactttctatgaatagcaatgtgagtcctactaggacaggactgtgtcaatgcagaagaaaaagcaaatggaaccccttgggtcaaatagaagattagaagttagaaaagaggaaacaaccctggatcacagcagaagttacttacttgagacagttctgtgtcactaatcatctgaaaccttagagacctaaaacaacaacaatcatttattttgctcacaaatatacaatctgggcacggctcagtacagataggtcatttctgttccatataattttagctgaaacagctcaatgaggactgccagatccactttcaagatatctcattcatatggctgaggctggctctctgggagctctgccagagcagtgggctgtgaacctccttcccatgtgagtctatctccaggatgtttgggatcatttatggctgggttccaagaacaaacagcctgagagagaaaatgagaaactgatggagtcttaatgtctggaccaaaaaaacttggttctgctgcattctatcagttaagtggtcacagtacccagattcgagggcaggagatatagatgtcatgtctcagtgggaagaatgtcaaataattttggtaccatgttttaagatggccacagaggaaataattagaacaggcagccaaaattttactcttgagaattcctaataggccaagttaactgctaaataaagtgtatgtagttctctttggattgggtggatttagtcacacaagtccttttaaaatcctgagttaaaaatattcctttttttactattatttatgactcagttaggtcaatcctacctgattatccaccacgattttggagattaacatcagcaaaataggagtagcataatcctatatgaaacgtagtcttggtaagaaaatgacaccaagcaagtcataaccagacatatcttaaaagcaactatataaaagagacatccatgggagaggaagaaagataaaaatgatagcaaatttctcattggaagtaatgcaaataagaagatggcaaagcagtatctttaaagtacagtaagtcctcacttaacattgtagataggttcttgaaaatggcaacttttagcaaaatgatgtacagcaggccctcgaataacattgtttccttcgacattttttcattacaatgttgatgagaaaaaaatgcttttattatacgttgttttgtttaaagtttccaagaacctactgatgacattgaggacctactgtactgaaaacaaaacaaaacaaaacaaaacaaaaaaacctgccagcctaaaattctgtatccagtgaaattatctctgaaaaataaagatgaaataaaggcttttcaggcatataaaagttgaaaaaatgcattgccagcagacctgcactaatgtcctttaggcaggaagaaaatgatatcagatggaattctgaatatatgcaaagaaataaagggcactggaaatggtactacatgcgtaaatgtataagattttaagaatatctttaaaagataattatttttaaaaaataatgtactttggaatttataaaataggtataggtaaaatgtatgaaaataatagcataaaagctgggagtgaagaaacggaagtacactatcataaggctcttataccttacatgaaatatatagtatgatttgaaggcagactgtggtgagttaaaagcatatggtacatatgaaaccctaaagcagccactgccactaatataataaaacaaagttatatacaataagtcaacaaaggagataaaatggaataatgaaaatacttaatgaaatcaaaagaaggcagaaaaaggggcaaaggtatttaaaaaaagatggtacaaatagaaaacaaatagcaagaggatagccccaaacctagccatatcaataatcacattaaatacaaatggcctaaatatgaccattaaaaaggagacataatcagactgaatttttaaagaaaatacgtgagaacaaactatatgagagacatactttaaaaacacaaataggttaacagtgaaagaatgcagaaaatggagaaagatatactatgctaatgaactgtccctcagtgagttaaagaaaccaatgactaaatttttgggcttataagatagcagataagaaaagaaacaacttgctgaaaagctgaaactgaaactgtgcaccaaagagtaagaaaccagtaactaacagaaactcttgagctggcaggatatcagataagaagcaacttgctgaaacgctgaaactcccttggcttctgatatcaagaaaaaaaaactggctgaaatcagttggaaccaagatggcctactggagtttgcacagaatgagcttgctgacatcacagcctaaatttccaccatatgtttcatactaactccccctgatttgcacatgagacctgtgatctagcatgaagagataactgcgcatgcctaaggactttccagacctccctttccttccaccaatcacctactgatctcagaatctaccccctgaacttttcctaaaataaatattgtcttgaagccagcacagggagacagatttgagcttgacactcttattttcttgtgagtcaacttgcaatataaagcttttcttttctcaaaaactcaatgtcattatattggcttctagcacatccagcagcaagacacttttgtgcagtaacactaataatggtcaaaagaaagctggctatctacatatgtctacctatttatctagaggcataaatctcatctatatctctatcacacatatttcagagaggcatattaccagggataaagaaggtcatttcataatgataaagaggtaaatttatcaagaggacataacagtcttaagtgtttatgcacctaataacagagctttaaagtagataaaacttcacagaactacaaggagatatagaaaaatttacaattatggtagaagatttctttttttttttttttaatttgagacaaagtctttctcttttgcccaggctggagtgcaatggtgcaatcttgtctcactgcaacctctgccttctgggttcaagcgattctcctgcctcagcctcctgagtagctaagattgcaggcgtgtgccaccactaccagctaatagtagtatttttagtagagatggggtttcaccatgttggccaggctggtctcaaactcctgacctcaagtgatctgcctgcctcagcctccaaaagtgctgggattgcaggcgtgagccaccacacccggccaattatggtagaagatttcaatacccatttctcaataatccatagaataaggaggcagagttagcaaggatatagtagacttaaataacactgtcaaccaagttggcctaattaacatatatagaacactctacctaacaatattagaatgttcatcctttttgagtgcaaacagaatctttaccaagacagaccatattctgggccgataaactggaagtagctcaaatgtccatcagaaggagaatgggcaaacaaattgcggcatagccatataatggctactactaagcattagaaagaaattaattggtcatacatgcaacaccatggacaaatctcaagataattatgttcagttgaaaccagacaaaaaagactacatactgtatgattctatttacataatatactagaaaacccaaattagtctatactttcggaaagcagattagtgcttgcctgagcagggttggagtggggatgtgggtgagagggtaggagaaaaggattaaaatagagcaggagaaactgctggggctactgagtatgttcacagtttaattgaggtgatggttttatggatgtctggatatgccaaagcttatcaaattgtacactttcgttacaataaaaagtcagcccatttagaagtttataaagaaaagtgaaaattgtttctctgctccagatcttacttaggtttagagtttgtattttctttctttctttctttcttttttctttttctttctttttttttttttgaggcagagtctagttctgtcgcccagactggagtgcagtggcatgatcttggctcactgcaacctccgcctcccaggttcaagcgattctcctgcctcagcctcctgagtagctgggattacaggcacctgccacagcgcccaggtaatttttgtatttttagtagagatggggtttcactgtgttggccaggctggtctcgaactcctgacctcgtgatctgcctgccttggcctcccaaagtgctgggattacaggcgtgagccaccacacccagcttattttttcttttaagggatgggtcttgctgtgttgcttgggctggcctcaaactcctgggctcaagcaatcctcctgtctcagagtttagcatttcttaacatcatcttaacccacactgttcaatataataacctactagccacaagtggccatccaaatttaaattaattacaattaaaatgtaaaactgggctgggtacagtagctcacgcctgtaatcccagcactttgggaggctgaggcgggcagatcacgaggtcaggagttccagatcagcctggccaatatggtgaaaccccatctctactaaaaatacaaaaattagccgggtgtgttggtgtgtgcctgtagttctagctactcgggaggctgaggcagaagaatcccttgaacctgggaggcggaggttgcagtgagccaagatgtgacactaactctaccctgggtgacagagcaagactccgtctaaaaaaaaaaaaaggaaaactcagtccttagttgcaataggcacattccaagaactcaatagccatttgtggctagaggccaacatattggagagttcagattatagaacatttctgccattagagaaagttcttttggatagctttttcctgggctatgtagagactcagcactattacaagcaacttagatctttcactggccgcttattgagcacttacttttgccagaaactgccaggtcctttatatgaattatctctaattcttgcagggaaagactaagagaagcttgaataattttccaagggtcgcagttactaactggtatacctaacatgtaaacctatgtctatctaaccccaaagcctaagttcttatgtgggtctcatatctcctgtgactgggccatccccctttccttctatacttgtgaaggattcttttcatattcaaccatggagtcttatatttatccctcctaaattttgtcttgttggattaagcttattgctccagattgtcaaaatattttaggatcctcatcctgtcattccatatgctcactcgccttccaagcttcatgtatttactgactttgataaatatggcccccctaaacttcatctgagtgatcgataaaaatcattgctaagacaagggaaaggatgaaggcctgtggtcggctatcagaaaccctcccgcttgaggttgacatcagtttaccagtctgtaaccttcaagataccagcataccaacccatttctactcttatctccagattctgagggatatgttctatatttggagcctaaagacctactagcaccatctagaatcatatgctggttataaatgacttccagatgttagccaaacaatgtttgcttctaaccaaacataagggccagaaagatcaagatattggcaccagtgttgatgcttgtcatttccacttagccctccttgctgccctcacctctaaagtggttgtttgataatttgttgctaaaagcaaaccatcccacaacagcggcttcaaataatagcaatcatttatttgctgatgaatttgaaatgtggacatggctgggtgagaacagtgggcctctactttactgtggcattggctgagcttaaagaacagctgtggactggcacaatgaggttcctctagcacaactctgagagtcttgtcagcttttctcatggcttcctgccgcctcctccccaccccgctttcaaacactgcccatattgaccaacatgtgtttcccacaatgtgccatcattgaccatctctagggctccatccagtgtgcctgtccttttccatgaatcctcaaagactcagccaaggtgtcacctctacctaggagccttccctgatatcccctgcccccacacaacttggtttgcattactgtctctctactgtgttccacagcatgctttatttccccttttcaaagcacttctaccactgtaatggattatcctctttgtttgcctgtctttcccatgagatcctcagctcttcaggggatgaaattgttgtcattttgcattcccagaccatagcatagtgtgtaagatacagtgggtgctcaatctgttgaatcaatgagtgatatgatgatgacaggttctggaagttaaaatgatactatcgaaataccagattagcaacaggacctggcacctgtaaagagccacagtgaagcaggttctactggacataagattaaatgagttcaagtccataaagcatttggagcactgtctcacaaatagtaggcgccatataagcatttgttgttgctattatcattgttacgatgcttgcggctttcaggtgtagagctgtctttgccaaaggttctttttgctctcccattagggtttttctttaacagggaccttggacaacgttggcacttcctcctcctctgggagttccctgggaggaatcctctggaagagaaagtgtgttcaagactaacagagtctgcatgtgtttttctcttggcaaaggctcagtccctgctctagcaccattagcttcgctcctattgtcttccactgcagcaggtggatgcagggatcaccacctgccaggtgcttctaagcttccccaggcacagcagggctaagaaaagggagaagtgagttcagggacagagtgctctggtatgccgccaccctgggatcaacagctccctttcccccaggatgtcctttgtgggaaggctggaaggaaagccgcccactgaaatgaaaactcctcacactttgggaaagggtttggtctgcaccttaatttggaagaggtgtccaggttcttcaagttcccacaggccttgttcttgccctgcctttctggggtagtcagaagctgacaagtcccagagttctctcgtcatgtccgtgccccaccgtgcctggaatctggaggaacttgagcacggcagttttagcctgaactgtgattaatatttggtgctgggaaaactgggggttctgggctaagcctgaaattattctgggcaagagggaaaggggaatttccaagatgccctcgagagaatgagcggggcagggtcctgagtaagaggcttgcatgaagggggaaatggagaagggcgatagggaaacacccctgggtagaagggctaagaagcaagataagtgggaatggcagctgcagggcccacgaagagccatagctatgggcaaagttggcacaagaatcctggaggagaatgctggaggctggtgggtgatatggaggaaagaatggggttgagatgttctacttgtgctcctcttccatgtctcaggttaaacctcacttccttagagaggcctttcctgatcctcataaccctcattccattccggagtcagtctccatgggtctggatctcagctcctcacttacaagctcgacaaccttgtccaagtgtttaaactcttttaacttcagttttatcaatctgtgttatgtggctaaagatagtaccttctcacaaggttgtaaggattaaataaattaatatattgaaaatgcttagcacagagcccaggtcttgactggtaagagtgatcatgacatctgtttaatggcctgtctctcctactactgtgaggtctgtggggccgggaatatgctgtccactttggtgtcccccaacgcttcggtgtcccccaaacctagtgcagggcctggcttgttgtagggtcccagctgaatgaatgtgtaagtgaccagggtgggctcaggtggttgcagccttgtgggggttagggtctagggttatatttcactgcatggatcctttctttttctttcttttttttttgtttgaaatgaagtctcactctgttgcctgggctggagtatagtggtgtgatctcggctcactgcagcctccacctcctaggttccagtgattttcctgtctcagcctcctgagtagctgggactaaaggcatgtgccaccatgcctggctaatttttgtatttgtagtagagacggggtttctccatgttggccaggctggtctcaaaaccctgacctcaagtgatccactagcctcggcatcccaaagtgctgggaggcatatgccaccgcacctggcctaaacattttttttctaggtgatccaagttagaaaagacaccaagatggctgggtgtggtggctcactcctgtaatcccagcactttgggaggctgaggtgggcggatcacgaggtcaggagattgagaccatcctggcaaacatggtgaaaccccttctctactaaaaatacaaaaaaaattagctgggcgtggtggcgtgcgcctgcagtcccagctactcgggttgctgaggcaggagaaaggtgtgaacccgggaggtggagattgcagtgagccgagatcatgccactgcactctaacctggtgacagcgagactccgtctaaaaaaaaaaaaagacaccaagacaccaagattattcctggatagaataactgtggatgaccatttttctttccttctagttttttattccattatctattttatttttgtgttctctataatttttccataccaaagcaaggattacttttctaatggctgagaaaagaaaatgttattaaacaaacataacactctccgttgtctggaggtgaggagccatcactgaaggataagaatgggtaagaaatgcagggaataaacagtgtgtgatgggaaggcttctcagccttccaaggcctgttggaggtttcacaggatgttcctgccaagggaattctcaaagctcaaagccatgggggtggaggccctgcttccctccgtcttaagaaggatgtgacttgggcaagtttcagttttagcaggatcgccgtgtcttcagagggaaagaatgttctcaaccttgaatcttttgccaagaaatggtcctgagtgttttgaggggcaaaactgctgctcctgctgctcactcaagcactgttacttgatatcagcggattatttctctccagaggcttgggtcccctggatggagggcaaccctagctgttgccccagggggaaggcagggaggaggctcggacggagttaagaagcctaggtaggctgagttctagctctagctggctgcatgatccttcaatcattgagccttagccttcccatctaaagaaaggaggacatcttccctattgatatggaagatcttccctgttgacatggaattccgagtgtgaagtaatgctatatgtgaaaaatgccctggagatcataaagtgatggacagatgctgtttgtgaatgagaagagtattggtggaatagaggaaaacatagactctcttcagtgagttaagtttatgtttcttgcatctgccgattcaaaaacatgtatggcatttcctccttcttgtaggagcttcctgtatgttatactctctgttcctcatttgccacatgttatagatgagaaaactggggctaagggaagatagactgacctggttttcccaagatcacagagctagtaagagtaggggaggaattatcacccccatttctccggatgaggaaactgaggcacagagagattaattcatttgtctgaagttatagagccagcaagtgtgaaagttatacctgagtctaaaagaaaaaaatcttttttttgagatggagttttgttcttgttgcccaggctggagtgcaatggcacgatctcggctcactgcaacctctgcctcctgggttcaagcgattatcctgccttagcctcctgggattacaggcgcccatcaccacaccctgctaattttctgtatttttagtagagatggggtttcactgtgttggccaggctgttctcgaactcctgacctcaggcaatctgtccacctcggcctcccaaagtgctgggattataggcatgagccactgcgccaggccccctgaatccaaatcttttaatgttactaatttagggttcatggactcttgaggggttctcagaaagacatcagaaggaaagtttgcatatgtgtacatttttgtggggagagggattccatatattgaatcaacttctcaaatgaatcagaaatcttggacctgtagttggtgcataagtaactctttctgtatttaaacattgatcatactacaagaaaagctttagtgatggcaagttactctggcacttaaaatgtgcttaattgttactgtgcttcaaggctgtgagtcaaaatgattgatttgcctttgatgcagctggccaacttgaatttttctttctcctggcttaataactcttcaatatctataagatgtcaagatcaaaatttttccttctgataccacattttgtttaatcttcaacttaggtgcaaaccctagacgaaaaaagactgtaattcaactcttcagtagccaggattgcctgtctccaaccccttctgaatctagttatgttggatactgggagagaagcatgtagactctttgggcctgacctttctgatttttctctggaagggcttcactgaaggggcacagaagaataatgtttctacagcatagatccaggggctcctccccaccaggaacccagcttagcaggcaggctgttcatgtggaactcgccaaaaccccgtgcaggtggatgtgcggaaacaccaaagaactgcacgattgtccctgcctttggaaggtctcattccctgtcattccttcattcagtcaacaaacttggaggacccagtatgtgctacattttgaggataaagtgatgaacaacacagacaagatccctgcccttgtggagtctatattcaaaccagagcttgaccttcaaactgagagaccaacttaaaaatggggccatctggccactaactgttatacaccctctgcttgggacacacggtctcagccctcctccaccttcaagtctgataggagagagatttcagagtggcccaaacaatctaaagtaaaagtgaacagagttcaaaataagtcctcaagggctgaggggagaccaaggggaagataatgcggtgagggcactgagagagggattcctagaggaattgtaccttgctttgaattttagccctaagctgcaaatcctagctaacttctaagtagatgctgacagctggcttctatttggtctgccatattgaatggctttgtccccaggacatggtggagatttagacaacccagggcagaaaatcctctaggaaaggaagtctgaactacaccgctggctttctgaaaggacaggatttgaggagctgggatggtagtaggggagagggcagctgggtggggtttcttccaggaaacaatgtggatgcaagatgcagtcctcgtccctggcctgcccttaccgctttagtatttcagatgagtcagctctcactctgccacctgctttctgtaactctgcagcaggccagcagcctccagtccaccctctcctcctcccagggctctggggtgaagccctccccaggaactccctggctcccagtacccatgggagaagctcttttcaactgacatgatttattttaacaataagaggaaaaaaccacatccgatttccacagaattagagttcctcctgacacgcctggacttgccagttgggaaggacactctcaagccatcctctatgccatttgccgttctgctgttcctttgcttggagggaagagatgcctgtttctatagggaggaagtttgaagtgagaagagaggacaaagattctgtgaatggaaagagcactggactgagagttcagggatgtggcctccggtcccagctccaccactactcagttgtctgacgaaggaaacagaaagttgtgatacaatgtgggtgacacattgcctagaaagaagtgccgttgtgatacgcttatgttggtgggatgggggaaagaaataacaggtttgtatggagtgttatgaaagaattaaatcttaaccttccattggggtaagctgatggaaacaaccatagcaaaggacagactgaatatttttttattctctttatagaaaataacagtaaaaaaaagtattgacataggagaaggaaacaaaaagttgtcaggagttaatgaatagaaatattatttttttctggattttatggtgtttgtgttatttgttagcttttatgaatttgtaatttgttgtaatttctttctaaataagtatttacttttgtctctaattttgtccatctatttttgaattcaattttcaaattcaaaacgcttctctcggccgggcacggtggctcacgcctgtaatcccagcactttgggaggtcgaggagggcggatcacgaggtcaggagatcgagaccatcctggctaacacagtgaaaccccgtctctactaaaaatacaaaaaattagccaggcgaggtggtgggcgcctgtagtcccagctactcgggaggctgaggcaggagaatggcatgaaccccggggggcggagcctgcagtgagccgagatcgtgccactgcactccagcctgggtgacagcgagactccgtctcaaaaaacaaaacaaaacaaaacaaaaaaaacaaaaagaacaaaatgcttctctctgggcctcagctgttccctcatctgtaaatgagaagggtgggccagatgctctttcatgtctggtgtaatgaagccctggagtgggctgcctatgactgcacgcagctgtaccacaccccacctgggtgtctttgggtgaagtacttggtagctccaagtctcatcttccttatccaaaatgatggacacaaaaatagtattgacctcatggaataggtgtgaagatgaaaacagacaatgcatatggatgcttcacacagaccctggggtggcaaatgtgctcagtacttgttagttattagtgtgagtctactcttttagtctatgaattttgttagaggaactcctgcttaccaggcctctggtttaataaaacatgactggagtgacacatttctaagctcaccaccacttataattacagaagattgatggctatataggacatctcccaccaagcctgcagaatgtccagatgtcccaagtacagcccactttactcagagataacgtcaatgagcagactcaagttgaaggattaatggtcactagagcaccaacagcccctacctttagtgagcacatctgcacattccaagtttaatcatagctccttatagcttcttataagcagagatgttcctaaaggacaggggttcctcctcctgctttctgggcatgccctactctctaatggagtagtttccaataaatttgcttctttgtctgtgctccaattctttcctgtgtgagatctaagaacccactcttggggtctagattgggatccccttttctggcaacatcttgagtatgtgaccatgagaaatgttagaaattggagtgaaaggtacgtaaacatttgaacccaataccattctctggttctcccagaggcacagtaaaaaaaagtattgacatagaagaaggaaacaaaaagttgtcaggagttaaagaataaagatttttttttctggattttgtggtgtttgtggtatttgttagcttttatgatttgtaatttgttgtaatttctctttctaaataaacgtttacttttgtctctaattttgtatttctatttttgaattcaatttattttcccgcagacagggtctcactctgttgcccaggctggagtgcaatggtgaaattatagcagactgcagtcttcaactcctgacctcaagcaattgtcctgcctcctcaacttcctgactacaggtgtgcatgaggactacaggcaggcatgtgccaacacatgcagctttttttttttttttttttcagagatgtggtctcgctttgttgcctacactggtctcaaactcttggcctcaagggatcctcccacctcggcttcccaaagtgcagagattacaggtgtgagccactgtgcccagcctgaattcaatttcttaaaaggactctccccacccaattgtatgagctatgcatggccagatttagcaaatacaaatacaagacacccagttaacttggaatttcaggtagataaacactgagatgttttcattgaaattcaaagttaaatatgcatcttgtatccagcgggaatataaaaaaggaaagtagtggtcaactcaaccagggttgaagtggggaggaggaggggagtggggagaggaaaggaagaggggagaagtttcacaaaggaagtcacactggagctaggttttgaacgttaggttggtgtttacaaggtaggtgaggcagcggggctttctaggtgagatgagcctgtgaggtgtgggagatctgcaagagagatgaggcggaaaatgtaggcgaagtccaggctgtgatgggtctggatgctgtggggagcagatttcctgctactgggaggccccagggcgttatgctgggagttttagactggagagttccaagactgggtttgcattttaaaaagtccacctacctagggaagagtggattgttcaggagaggaatggggaggcatcagttgggctctttccattactatccctccatcccatcaccactggggctctttcataacatttgaaccacagagcccattgacataagatgtgtcacccagggtctgaggctttgaacagactttgaccaagatccctgtgggcaaaaaaggaggaggagaaggaagtacaggctgaagtggcataggtgcccaatgtggatttgtgcttccctccccaggagcacaggtgtggccagtttgtatttccttaagtcctcagcttcctgggtaatgacaagtcagaacagcatggcttgggagagttatgtcacctcctctgctgaatgggcttgaggttcctcacaagtctaggttcctttccactctacctaatcctagagtgaaagggcagcatggggttagaaagggcgctgagccagaggtaaggagatagaggtttgagagcagttgtgccacttccttgcggtgccatggggggctggttcacttctctatttcctcatcgctgtaatgtgaacattgaactgagttatctctgttatattttctgactctcatttccaaatatcacaataaaggagagccaaccccactgaaaatgaggaataaaagagagagaaaagataaaaaaacaaaaacaaaacaaaggagaaacttctttaggtttaaatttcccagttctttttctcacctttttttttgttttattttcaaagctatacagaagttcacacatatcattatgatctagatatatttaccaagacatttaaacatttatgtattctgttttaaaatccctattagcttcccaaataaaatacccatccatcattatcagttttatatatatatatatatttgagatggagtcttgctctgttgcccaggctggagtgcagtggtgcggtctcggctcactgcaagctctgcctcccgggttcatgccattctcccgcctctgcctgccgagtagctggaattacaggtactgccaccacgccaggctaattttttgtatttttagtagagacggggtttcaccacattggctaggatggtctcgatctcctgacctcgtgatccgcccgccttggcctcccaaagtgctgggattacaggcgtgagccaccgctcctggcctacgtttctttttttacaaattcgttctcagtcatacttcttcgtgttttatagtcctcataatgataggttctttctcaaatctaaccaaaattactcatatagatctaatacatttcatctaaatcctgcaatgggccacacattgctcaagtccatggagcctcattcccacagaaggcaataggcatggtaccctctggaattatgcaatttttgtatgcgctcaagactcagtacttaggaatggccaggatccactcttttaagggaaggaaattgccctggcatcattatgaaaaattcatgaggttggagtgcatgttaggcggggataaggaattggaagacatgagagagttgtgtccagaacatgtcaaactcaaagcattctccattctggctcgccaatcttccctcacattctttctgcttccctactcaacaagtggaaaattgagctctgatatctcaatggtgggtccattggtcccagaagtcctaattctaaggcagatgcaaccttgtgtctggagaccagattcataattgaattgcaatcctgggaaagatgccattctatctcaatctatattcttatttttgatattaggggtcaggcagcaaggcttaagatgaagagaacttatttcttattgttcccccttcttcctgatttaggagctctaaagggaattataaaattgataataaatgtcattttcaagttgcttattatgcgccaggtactgtgctgaggaattatgtgtaatcacttcatcttcatgctgcgcctacatggtgaacgtgcagtaggcatgatgtgtaccattttacagatgagtaaacaggcactgagattaagtggcttgccttcagtctgacagccatagaaagcagagccagtcaacccagcttccagtaccagcgattatggtacaccacatgctggaagaggagctataaacacatcacttatttcccttcccctgcaagcttcctgatatgacatatctgccctgaaatgaaagctaggtcagaacatatagcctgagcacaaggggtgaatgtggggtgagactcagcatggacagtgttgtaaatccccttacatgtgcagctgggctctgagctgctattctcacatgtgcagagggactccgagccaggcagctcaggccctgctgggaaaacagcacccacctccctccatcccacccctctgggggaaacaagggtgggagtaggggagattcccgaggtcaagagtagctctttgcaccctctccaaaggagcagaaagatgtccattagctcctaacaaaggtgtcttctccttttccaggtgcctggcacacaggatagaaatacataatatttattaaggagtacttactatgacacaggtcctttagctcattcaaatcctcacagttttattttacctattttatggagcttcagaaaggctttaagtagcttttccagtgtctatagacctaatgcatttcatccagactctgcaatagggccacatattgctcaactccatggaacctcattcccatagaaggcaataggcatggtaacctttctgagcaaggcagagagggtacctgcctggccataccctcgtcttatttccttaattgttttctttcttctttaagatatagctgattaatcattattatgaaatgcctctttcttctgggtcttgacatgcagcttctaggaaaaatgataaactccccatctccatgcaaatgagattttttttgcaattctatgttcatacagaaaaatccaagttaggtcactttcctgagagctgtggcatgctaccaagaagagaagggagataaggaagaagagaagagagtgaaccagggtttaaatccagaactacgttgtgaaccactatagtctaccacttccctcaacacttaccattttattatgtccaagatgctggaccacaagacatcaagtgcctggggtttctttcccttgcacctgtcccgtaaaaggccctgatctttcctgtcccttttccttctctgccggtgccctgtggccctctctgtctcccaaatctggctgcaggaacagggtttgtaccagcccagtggggtctcataattgcacctcatcccaaggtcacttcatttggttaaaaataagctccatttattctgggagtctgtgtttggggatgtcaaaagacaaaattacaacacatttagtttaaagatcttaattggcttttatttgcaattctagaatcaggcaacatcctattttataaaaatagaatgagtggtcccatgagctgacagaggagagtggttttgtgggcagacaactgctagaggaagcagaaacagagaacaaaaagcaaactggtcatttaaaagttactttccttgtaaaggttagagcagaggagacttccttatacgctggctaaaactggcttgtttcaggatttggctattatctttctctctcctgatttctcagaaggttagataaacagtttagtttcagcttggtggtgtggaacttcattcagcatgagcgactccatttaggtttggcctattggcctagtgcagtaactcagtccaaaccaattaccccctggaaattttatttaatgggaagaaactgtttataccctatcttttcattgccccaaacctgatccctagagaacttcttggtaaagagtttatgtaaaaaggtaatttagttagagagtcttctagcccaagaataaggatttcaggtcctggctctgccactggctgatcttaaacctctcttctttccagtctcattttctctctctctgcattaatcaagaatgagagaaccctccaggggacaagatgaaggggaaatagatgatgtgcaaagaaatccttgctttatgaggggaaaaagtgttcctcatgaagttcaacaaaatgatgcaggtaaagcagttagctagcacctggcacatggcagacactcatagctgcctaaggcattggagaactggatcgtgctgcagccagaggcacctgcagagcctcatgggctggctgctgcagggtgtggctgattgagagtgcttttgtgagttggcctgcagggtacacttggtaacgtgccacagctctcaggaaagtgacctaagttggatttttctgcatggacatagaattgcaaaaaattctcatttgcatggagatggggagtttatttttcctagaagctgcatgtcaagacccagaagaaagaggcatttcataataatgattaatcagctatatcttaaagaagaaagaaaacaattaaggaaatacaatactaagaaaacaaggggaaaaaacaatctccccaaggtggatccacccagcaaaccttgagagcatttcctcttatccacctgaataaaaatgaccagccctttccaaatggcagagagcactgagaggagacacaaggagcagcccgcaagcaccaagtgagaggtgaggctcacgctgtccgtcatcaggggctcctatgcaccgccatcctagccctcctccttcactgccgcagggaggtgacctgttaccattgtgtatggctatgatgttccagatgctgggcatttggtagaatgggaaggggtactctatagaaaaggtgaattttctagtatcttattttcaacgagaagagatagagagtgggaaagaaggagtgaaggaaggaaaggtcaaggatttaatgtctttactattgcttttttgttccaagaactgtgttgggcactttataatgtgttatcattgtttaatcctttgcaatgtgaaatatctttttaaatgtaaggagcatcactggttcagaaatgggttcctgtctgtctggtgtcaggggagctactgggatcccaggctatgatgtcagagggaaacaatgttgtaagtggggtggagtagcagtaaagacagccagctcagggactggcccgccttctctcaaaccctggcttgggcaggttacttcatttttttggtaaaatgggaacagaaacagagcctacttcatagggtggttgtgagcattaaatgagaaaattacgtaaaattcttgggacagtgcccaatgcacatggcacgcaggataaatgttacttactactaatatctgaattagccaagatgtctggaattgcctcaccaagctaagggagacatctttctcctccacaaaatgcgcaagtctcctggcatgggatgagcaggcaatatctgcctgcttctgagagttaccttgtcagaagaaaaactgcactctctttcttggctttctagaagcaccccagtagcgttctgaggagacagagctctgggggactctctacaaacttccctggcaatggggcccatccttgtttagccagaaagagaggttgataaaagaggaaaggagctctttggcttaatgcctgccacgtggtaaggtcttgacatacacctgtctattccctgggaatgatgcccagttaaggagagacaggcaaaaatggtttctaaacaggatttgctgtttctggctttccagaggagctgggaatcctgaggaaggcatggggagtgggggcagctggggttcacactcacacgtgtgagttacagcagctttaactatagctctacagtcctcgcagctggctccctgtgtcttatgccctcctctcctccacggccacacacgatacacttaccttggcacacacagctgtaaatgggagatctcagtgggcaccatgcaaagtgcatagcagagggctgctctcgtcacatgtgttgtcataagacatgcgttaaggctaagctctatttataagcttgtgaaatgtgggtgaaaacagagataaccccataagctgtaccattatattttacgcacttttctctgtgcgcattatgtggcacaatacaaagtggttaaatgaagaggcagcaagaaagacagaggcaagaagggtaagagaatgagaagcggtggcaaacctctcagggtctggccctggctatgaagcagctagctgcaaacatgcccctcataccctttggctcagcaggtgaccgacgggaagttgccaagctgccctctaccattggcttcttcccctagctccttattgtggctaattagttcttgaagatgccttgtgcctccctttcccatctctccagaaggtgaaatctccacagctggcttcaaacaaatgattttaagcagatacactcttgaggtttataataaaagggtgttacttatttcaggggcaaacatcaaaaaccaagtgtgtttttatggtttttcacatctgttgccgaattcctagggcatcttaccaaccctgcttttcctatttaatttattaaaaacaatgcttttcacccctgttgacaaagtaggctgtgttgagtcataggagagtgatatgcatacaagtatgcttcctgggacttaagagagtggtgtatcgtgttttctggggtggaggtgggggcatggggtgagggtggggaagaactcatatccagttgactcaagaaaaccagaggagatacatacccctgtaactcctcaaggctgaagtgtttagtgttgttttcttgtattcctcccggcctgccttcgaggctggaaaggagcgtcaatcaggggtcttctttttcattgccctccactcttggctggacagctgacttcctctcctttctgcaggcatgaagttacagtgtgtttccctttggctcctgggtacaatactgatattgtgctcagtagacaaccacggtctcaggagatgtctgatttccacagacatgcaccatatagaagagagtttccaagaaatcaaaagagccatcgtgagtatgggttggtgtaaaggtgtggatgacggagtatccctccccttacatcttagcttgaaaatgagttccttctcattgccttttgcatctcagaagaacataggataccgattgcttatgtctgttcttatgtttccctccacagcaagctaaggacaccttcccaaatgtcactatcctgtccacattggagactctgcagatcattaaggtattggcctgtgtctgctttttccagtatttttatcttcatgtctaaatggctctgggctgagaaagaaatccctaccttgtccccttctctttcctaatctccaatgtactctaaatgcaccaggcttctttgtcagatgatgtgttagggcacgctagtgtcccagggatatgtaacccctgggaggaattaaagaagtgctgcttcctagagagtgattgggggtgccaggtgctcagaggggacaggatttccgtggcttgggggtaattttggaaggtcccatggaggtagctaagaaaacaaacggtgacttaacccgaggaggttgtagatcagtgaataagagggaggaaggaatttgggcaggataagataatgggtgtaagatcagtgaaggtcggacatagaggtgaccaggtttgtgacccaaaggacatataagtgagtggtgggagatgaggtgaaaaaataccctggagtcattttataaaggtccctggagccaggctgagcctcaggcttataatacagacaataggctgggtgcagtggcttatgcctgtaatttcagcattttgggaggctgaggctggtaggattgcttgagatcggggcttgagaccagccagagcaacatagcatgacctcgtctctacaaaacaaaacaaaacaattatcagggcatagtggcatgcaactctattcccagctacttgggcggctgagatgggaggattgcttgagcctgggaggtcaaagctgcagtgagccatgattgtgtcaatgcactccagcctgggtgccagattgagacacccaaaaagaataaaagaatgtgtgttagggcatgctagtgtcccaaggacttggaatccctgggaggaattaaagaagtgccgcttcctagagagtgattgggagctcccagtgctcagaggggattaggatttctgtggcttaggggtaattttggaaggccccatgggggtataaaagaataaaagaaaataatagcagcaatagagagtcaatgagatttttgagcccaaagttatatgatcataaattgttttagaaagacaatctggtgctgttcttacaatggacaacatgaggcaggaaagccagtgacaagatctgcccaatcatctagacaggaggtgatgaaagtatgttacaaaatagctggcttaccaggtgatcattcattttacaaaaaggcccatgagagatgcctttaaaagagagctcctccagtcctgggaagtattctagacagatccagttttgggagggattttgtatgacagagtgtaaggtatatttgtattgagttacttttttctcaggtttctctgcatacgtgagagacacacacacacacctcttcataattcttctaagcagtgatttatttgtggtgaagagatgtagccacttactaaataatattctagccaactgtattatagacacagaagatatgacagctagaagggacccaaaagaccatctattccaaaaccatcattttcaaatgaggacagtgagaccttgggagggagcatgactagttagtggcagagttaggaacagacccccaaatatatgcccccatcttcagattctttctcctctcaaggttgggaagtagctcatgtggaataagaaaaggagtcaataaggattcaggttccttcccttcctttcccttcccttcccttcccttcccttcccttcccttcccttcccttcccttcccttcccttcctctctccttcccttcctttctcactcccaccttccttttttctgcagtgttcctttttctagtaccacagtctttgatagtgcagaggggtgtaacattttgcccttctggttaagagaatcagcaacagtgaaggaagagaagggtttttgtgttgccatctaggaaaagctgacactggggccaaggaggctttgcttcttgaatgaagatgggtgtgctgtcccaccgttaaccactccctgcttagactgaacagttaatcttctgcagagtaactggctctcagggcagatggcgggcaaacttctagaaggaaactgtctagccaacttcactgggctgtgcctgggaatttagagactatttctttgggacatctgcactctgcaggctgcagacctacccaaatatgcccatttctgcagctgtcggtctctcttgcaaatctcagcctcattccaatgacctttctggttttaaaaggacagactacaggagagctgagcagtgtggtccagagtaaggtggccagaatgaatgcaatgtgattacagttggaggaatgcatacctagcaggatgactggcatgcaacagcccttgcatgttggcagatgggagacataacagagaggcaacttcagcccctgtagtgtagggaagttcttttcaagaaagctgctcagccatcagtccttttaaaaaggaggcaactggttcctggaaagatttcagtggaagttagtgatgacacgctagggatactgcagagagaattagcctatgatggattctgggccccatccttagtaaatgtatttctcggccatacagaaaaaggggagaactggaatctcttctcactatttttgtcataagtagctttgatgggaataagagaggatgaacactctgagaccattacgaatttttccaaaatgacttttagttctctcatgtgtcgctgcccctactcaaatggactgccctggtctccaacataatgagagaagaggcctctagtgtttccctaatttgtgtttgtagcccttagatgtgtgctgcgtgaccaagaacctcctggcgttctacgtggacagggtgttcaaggatcatcaggagccaaaccccaaaatcttgagaaaaatcagcagcattgccaactctttcctctacatgcagaaaactctgcggcaatgtgtgagtcactgggtcagaattccagcatctgctccctgtctgcccaaggagaggccaggaagtgctggcccccatcggcctcctgatatggtgcttggagtcaaaggaaattctctgcgcacgtccacagggagaactgtggagaacctctcccagtggccactgcttccccagggctccctgcctgctgacaactcctcagatggtctcctcctagataaccctcctggggtgaccaacttatgtcaacatattccttagtaagaggcatggcaaggactccagttctactgtaagcatacccctggtttctttatttctggccctttggtgtctttacatcaataaacctctgggtagttccttggtatggcctatccctaaaggttacttagaaattcattgcgatctatttaaatccaacatcagaaacaaaaccaacacaaaccaacaaaaacttagaccaggagagaacctgggctctagccccattcctgctaatgatttcctgtgagactttgtggcaagtgacttcacctctctgtgcctcggattctaaaattgttagaagagttgatggcccctgtcctacttgcattaatatgataatggactcaaataaattcacctaaccagttgtttaattaacaattcgttaaaattaattatctaattaataattaacatttaacaaatgtttgttgagtgcctaccctgtgggatgcagcactcagagtggtgataagacagatatggtgcctgctttcctagtgctgacagtctgatgtgttctaaatgcagaaaaaacaaaaggcgtgggcagatgcaggtgactctacagacaagctctattcttccgtggctgctcccacctgagtttactcatctgactctcactgtgggagggaggagaaatgtcacttctcatgtggggaggcaggagtaagagagggccagagtggaaatgtcctctgataggagcttcctccactttatcacagcaggaacagaggcagtgtcactgcaggcaggaagccaccaatgccaccagagtcatccatgacaactatgatcaggtaagatctgggaagaggttggggaagatggaagatgagaggtagatcaggagggtgccaggccttcagcctcctctccacttaaattcatgcattcactctataagcagccattgtgggcaggcctcaattctctgtgtctgtaaagagagttttgattttacctcatttgctaatctcctgggctccccatctccatcattcctccaccattttctcataccctcatatatcaagcctgacctgtatgatttggggaaagcacccactgcttaagatgggatgacacagagggagcaaagatcccccatgaaatgtgagctgttacgcctgaaacgtgttacctgcacgctgtcactgcgatcactacctgcccccccatattgtgtgtagtgatgaagacatggtacttctcatgttgatgttggtgtaaaatgcacatctcacgtggaggtagaggaagaagcagtgtttctcatgagcatcagttcaagatcttgttaaaatgcagattctggctcagcagggctgggatgagcctgagtttctgcatttagatcacactgtcaaatgataccaatgctttgaagagcaagagttagggagtctgttatgggctctgcttctttgtggagagactctgtaagataatgttatagaaatagctaagagttacatggttcttactataagccaggtattgctctaggcacacaacaagtattaacacacattcgtccttcccaacaatgctatgagtcattatctgcattggatacattaagaaactgaggctcgagcaggtaaagtaactaaactaagttcacactgcaactgcacggcagaggtaggattcaattccacgctggctggctctacaggacgcgctaaaagcatgaactcagtctgctgaggaaggaggtggaataaggcaggagacttgggtttcatttccagctctgttactaactggctgtgtgacattgggtaggacacttgctctaggggctttagtgctctaatatgtcaaatgaggacaacatgctctccctacccactgtccagcacctcagggacaaagatgttctgggataacagaagcactaaagcaagctggtgtggagaagaaaatcagcggaactggccagtaaggcagatttttttttcctgtgaaaaacagaggaaaaaaaaacctgagggaaaagaatgaagaattttaaagttctgtttataaggagctgacataatttaactacttgtttgtggggaaaaaaattggttgcctgcgaggaaaataatattgagtctgtatgttatgcaaatatatttcgtgacaaaaaaacaaaaacagaaacaaaaccttgtgggaaccagcatatgaagaaagtgacttgaaaaccattacacagtctagaaaggtgggttcttacattgatctctgatttcagctggaggtccacgctgctgccattaaatccctgggagagctcgacgtctttctagcctggattaataagaatcatgaagtaatgtcctcagcttgatgacaaggaacctgtatagtgatccagggatgaacaccccctgtgcggtttactgtgggagacagcccaccttgaaggggaaggagatggggaaggccccttgcagctgaaagtcccactggctggcctcaggctgtcttattccgcttgaaaatagccaaaaagtctactgtggtatttgtaataaactctatctgctgaaagggcctgcaggccatcctgggagtaaagggctgccttcccatctaatttattgtgaagtcatatagtccatgtctgtgatgtgagccaagtgatatcctgtagtacacattgtactgagtggtttttctgaataaattccatattttacctatgaatggaaggatcttttcattcagggagagtcagtcaagactgaggacagggtgtttctgacagagggatggttgtcatggtgacaaagctgaacaagcacagacacaagtaagtagagaggccactgggtagagaggctgaaaagggtaccaacatctagatggacactgcatagatgattcagagcacaaatgtgtatctttcagatttcatatcacatgctttaatggaaagaacaagacctctgaagtccaattgatctggttccaatcctatgtgactttgaacaaagcacttaacgtttctaagactcagtgtcctctgttgtaaagtggagatattaacaccagtcctgtagtgttgctgtgagcatcgagtaaggaaaaggtctctcatgacctcagcagggtgggagacagcacggtgcaatataaagactgccgactcaggggccaccttctggttctaaggcatctcctgccatgaatttcccagggcaggtcagtacatttctttggtccttagttgttagtattgtggatactgacccttctgtactacctgctccatataattatttatttatttatggagacagggtctcactttgtcacccaggctggagcacagtggcatggtcatagctcactgtagtctcaaactcctagctcaatcaatcctccctcctcggcctcccaaagttctggcattacagacttaagccaccacacctgcctctataatcatttaaaagctggagtcattatgagggctttgacaaccctgatatctgcacacacacccctcctggctgttttccctaactgtgtccctgctccttccccaggctcactgtgacccagccatagttgtttgctctgtgtttcgcaaacacaccaggcatgttctcaccatacagtgtatgcactttgtgtacatgcacactcataaactgaggtagggttaaaaaataaaacaaaccctccacacattatgcgttaatgggattcatacgctattagggagcagggttgtttgctgaggacctaacttttccaaagtgaccttggatgggcacccaccctgagcaggctgggtgatggcagttatagcatttctgatcttttatcactgccctgggatgtgcttcccctggacacctgcatggcttgcacctccacgtctttcagaccttcactccaaaggtctcgtattggaggataaccccccatttccaccttcagcacactttgtacccctttcctgtttatctagcatcctattttgtttattagctgctcctccacatgaatgtaagcttcatgagtgtagggatggtttagtttgttcactgcctggcacttagtaggtgttaaattcacaattcacctagattatttattcaagaaatgtgaataaccacaaacatgtatatagtgcttcctatatgccagccgatagtctaagaaatacacttcttgtaatataatataatataaatacatatatatatatttcatttaattctcacaacaatcctattgtaggtttttagaatgaaataaaatgaaaaaggccacctcattgattgttagcagtatggataattaaaccctaagaaggaaactaggcacagagagcttaagtaacttaccctaggccacatatcgcataagtagaagagctgagcttccaatccaggcagccacattccagaatgaactataatgtccacaataatgtacatatgttgagttcatcatgtgccaggcaccaaggtgagaacttaacttatggctcctcctttactcctcacgatagttctctaaggtacgattataattataatgtgaataactctgcactttgggaggctgaggtgggtggatcactaggtcaggagttcgagaccagccaggtcaacacggtgaaactccgtctctactaaaaatagaaaaaatagccaggcatggtggcgggcacctataatcccagctactggggaggctgaggcaagagaattgcttgaactcgggtggcagaggttgcagtgagctgagattgcttcattgcactccagcctgggtgacagagctagactctgtctcaaaaaaaaaaaaaaattgtctggagattagtgaggtttgacaatacacctaaggccatgtttctagttgtacaacagagattcaaactccgggtgtcctactccaaagcctgagccctccatcatgatggtttgtggcttgtgcatcttgctcatgtgacaagaagcccacaagagaaggtgatttactggcataatgacctgcacctgtaggaaatattgttattatcaatggtagtagaagtactagtaggagaggaggaggagcaggaggaagataattgaagaagagctcatcctttctgaaatggctagtatcttgcttaaaactctcctaggtctcttgtttgcttcctttccccgtctacttttcctttctcttttttcagacttgaagaatatgtcccaatgctttttgagttcgcagtagttctggcatagtggggtgtgtgtgtgtgtgtgtgcgtgtgtgtttgtgtgtgtttcttcacagagctggtgcttaagaaatacatgctaagaagccaagagtaacattatctcccaaaccatgctgagtcctctgtcagcccctagtaggtacccttgaaaaatctggagctcacctccactgctaaggtgcaaggggagggaatccatgtcacgcaccagggccatgacaggtactttacacataggacctcattcaagcctcagaggaagccaagggggttggagttcttatcctcacacggtcagtgaaggcatctcaggctcagggaggtgggggagcttgcccaagtccacaaagctttgggatggcagatccagaaaatgaatccaggccccatcttcctggctttggtgccctctccttttgctgctaggggagttccttttatcctggacaagactgtataacctagggcccaggttactatgttgaatgccagcaatgaagataactaaacccagatgcaccaaaaggggcttggactaactagccacaagcttctgaagttacacatgaaattatggacatacacagagcaaaggagcagaggccaacttctgagtatgtcacgcaatgttcccggcccagctgaggcctgggctcctcctggggatgctctatcctccttccatcttccagagcaaattgttaatagccacacatgttcatactgctgaaacttcatactgctgaaaaaggcactgaagaggtaggaaaaacagtcttgaatcgctgatgccaccctgtccccaatcccccatcagtggcagtgtggtgcagagagcagttttgtgttctggggagagggagagcgcagcaattgtgaggcattgaaatcagtactgtccttgttacaggagaaagcaaaactggaacacattcacctgatggccacccatggagggagatttaaaccagccctacccagaggggagtcactgaccccaacagtcagaacttgagtttctgcaagccttaccactgtgggctaaagtgctctggggttccaaataaacttgaaattcagtctaggccagaaggactgcaactcctaggcaagtactagtgttgaactgggcccagagccagcagactagggtgtgaatgcacacaatatactgagacatcaaccaaggcagctaaagtggtaccagcattacccctcctctaaccccaggctgcacagctcatagttcaaaataatgagactccttccttccacttcaggagtggagacaaaagagtagggaggactttgtcttgtatcttggataccagctcaaccacagaaggatagggcactggtcagtcatgaggccccctttccaggccctagctcccacttgacatttctaggcacgccctgggccagaagggaaccagttgcctagaagggaagcacccagttttggcaggatacatcactggctaactgaagagcccttgggccctgaataaccagcaatgatatccaggtactatgtcgacggccttgggtgagactctgagacttgctggcttcacatgagactcagcacattcctaactatggtagctatggggtgagacttcttctgcttgggaaaagtggagggaaacgtaaaggggactttgttttgcaccttaggtaccagcttggacacaatggggtacagaaccaactgggctcctggggtccctgattctaggacttggctcttggatggcatttctgaacctgccctggggaacagtggagcccacagccatgaagggtgagtcccaggcctagaagcattcaccacaagctgactgaagagcccttgggaacactggcagtagtgtggcagtactctctgtgggcctgaagtggcggtagccatccgatgaggctctcctgcctttggaaagcggtagaaagagtgggaaagtctacatcttgtgatttgagtgccagctcaggtgcagtacaataaagaacagaacacagggtagactcctgaggttttttactctagtctctgactcctagatagcacctctgggggcctgggggaacttgtcaccctgataagaagactctagtctctgactcccagatagcacctctgggggcctgggggaacttgtcaccctgataagaatgacacaggcctggctggctttgctacctgctgattgtagggccccagggccttgagcaaacacaggcagtagctaggcaatggttacagaaggccttgggtgagacccagtgctgtggtggcttcaggtctgacccagcacagtccttggtggccacaggggtgcttgtgtcactccaccctgagctccaggtgtctcaaaacagagagatagactgtttgggagaaagtaagggaagaaaacaggaatctttgcctggtaatccagagaattcttctggatcttgtccaagattgtcaaggtggtacctctacaagtctgcaagaatcacagtgttactgggcttggggtgccccctaaagcagattgagcttagatcacaacactcaagtccttttgaacatctggaaagccttcctaagaaggacaggtacaaacaagcccagactgtgaagattacaatacctacctcttacaattaatagctaaatgcctagacacagagaaacatctacaagcatcaagataatctaggaaaatattacctcacctagtgaaataaataaggcaccagggaccaaccaatcctggagaaacagagatatgtgacctttcagggagagaattcaaaatagctgcgttgagaaaacccaaagaaattcaagatcacacagagaaggaattcagaattctatcagataaatttaacagagagattgaaataatgagaaaaataaagcagaaattctggagctgaaaaatgcaattggcatactgaagaatacgtcagagtttgtttttcgtttttggttttttttttttttttttgacagagtctcactctgttgcccaggctggagtgcagtgggcgatctcggctcactgcaagctccgcctcccaggttcacgccattctcccacctcagcctccccagtagctgggactacaggcacctgccactgcttccggctaattttgtttttgtatttttagtagagacggggtctcaccatgttagccaggatggtctcaatctcctgacctcgtgatctgcccgcctcggcctcccaaagtgctgggattacaggcgtgagccgctgcgcccggccacatcagagttttttaatagcagaattcagcaagcagaagacaggctatttgaaaatatacagcaagaggagacaaaagaaaaagtaataaaaaacaatgaagcacgcctacaggatctagaaaataacttcaaaagggcaaatctaagagttattggccttaaagaggaagtacaggggtaggggtagaaaatttattgaaaggaataataacagagaacttctcaagcccagagaaagatattaatattgaagtacaagaagtttatagaacaccaagcaaatttaactcaaaggagactacgtcaaggcatttaataatcaaactcccaaaagtcaaagataaagaaaggatcctaaaagcaggaagaaaaaagaaacaacatacaccgtagcttcaatacatctggcagcagacttttcagtggaaaccttgtaggccaagagagagtggcatcatgacctatttaaagtgctgaagtaaaaaacttttactgtagaatatcagatctagtgaaaatagccttcaaacatgaaaaagaaataaggactttccaagacaaacaaaagctgagggatttcatcaacaccagacctgtcctgcaagagacgttaaagggagtgctttaatcagaaagaaaaggatgttaataagcagtaaggaatcatttgaaagtaaaaaactcactggtaatagtaagtgcacagaaaaatacagaatattataacactgtaactgtggtatgtaaactacttttatcttaagtagaaagactaaacaatgaaaaattatgaaaaatagtaacttccacttgaggagtggaacaagttttcgagacacagacagtacaataagatataaatagtaacaacaaaaagttaaaaagtgtgggaacaaagttaaggcatagagtctttattagtttttttttttttgcttgctttttgtttccttgtttatgcaaacagtgttaagttgttatcaagttaaattaacggactataaaatagtatttgcaagcctcatggtaacctcaaaccaaaaaacatacaatggatacacacaggcacaaaaatgaaaagcaagaaactaaattctatcaccagagaaaatcgctttcactaaaaggaagacaggaaggaaagacagaagaaagggaagatcacaaaccagccagaaaacaaatcacaaaatggcaggagtaagtccttacttatcaataataacattgaatgtaaatggactaaatgctccaatcaaaagacatagagtgactgaatggattttttaaaaaagacccaacgatctactacctacaagaaacatatttcatctattaagacacacagagtgaaaataaagggatggacaaacatattccacgcaaatggaaaccaaaaaagagcaggagtggctacagttaaatcagacaaaatagatttcaagacaaaagctgtaagaagagacaaagaaggtcactacataatgaaaatgggtcaattcagcaagaggatataacaattataaatacatatgaacttgatactggagcacccagatatataaagcaaatattagaacaaaagagagatagaccctgatacaataaaagctggagacttcaacagcccactttcagcactgaaaagatcttccagacagaaaatccacaaagaaacttaatctgcactatagaccaaaagaacctaatagatatttacagaacatttcatccaactgctgcagaacacattcttttcctcatgaggcacatggctcattctcaaggatagaccacattttaggtcataaaacaaggcaaaacattttaaaaaatttgagataccaagcatcttctctgaccacaatggaataaaactagaaacgaacaacaagaggaattttggaaattatacaaatacatggaaattaaacaatatgctcctgaataaccagcaggtaaatgaagacggaaattaaaaaatttcttgaagcaaatgataacagaaacacaagatgccaaaacctatgggatacaggaaaagcagtactaaaaagtaagtttatagctataagtgcctacatgaaaaaagaagagaaatgtcaactaaataacctaacaatacatcttaaacaacttgagaagtaagagcaaacctaatccaaaattagtagaaggaaagaaataataaaatcagcgcagaaataaaagaaattgaaatgaagaaaacaatacaaaagatcaatgaaacaaaaagttggttttttgaaaagttaaacaaagtggacaaacctttagccagactaactaggaaaaaagattcaaataaataaaatcggagatgaaaaaggagacattacaactgacaccacagaaattcaaaggatcattagtgggttactacgagcaactatatgccaacgaattggaaaatctagaagaaatgaaaaaatgaaaaaagtcctagacacatacaacctatcaagcttgaagacacatacaacctatcaagcttttgaagaaatccaaaacctgaacagaccaataacaagtaacaagattaaagctgtaagaaaaagtctcccagtggaaaaaaaagcccgggacccgatggcttcactgctgaattctacaagcatttaaagaagaactagtaccaatcctactcaaactattctgaaaaatagaggaagagggaatatttccaaactcattctatgaggccagtattatcattggctcattctcaaggatagaccatatgttaggtcacaaaacaagtcaaaacatttttaaaaaaaggaaatatcaagcatcttctctgaccacaatggaataaaactagaaaccaatagcaagaggaattttggaaattatacagatacatggaaattaaacaatacgctcctgaaccacagaaattcaaaggatcattagtggttactatgaaccactaaagacaaaaccaggcaaagacctctcaaaaaaagaaaactacaggccaatatctctgataactattgatgcaaaaatcctcaacaaaatactggcaaaccgaatttcacaatacagtgagatcattcatcatgaccaagtggggtttatccctggcatgcaaggatgtttcaacatatgcaaatgaatccatgtgatacatcatatcaacagaatgaaggataaaaaccacgtgattatttcaattgatgctgaaaaaggatttggtaaaatttaacatcccttcataaaaatccccaaaaaactggatatagaaggaacatacttcaacataataaaagccatataggacatactcacagcgagtatcatactgaatgaggaaaaactgaaagcctttcccctaagatatggaacaccatgaggatgtccactttcaccactgttattaaatgtagtacttgaagtgctagctagagcaatcaggcaaaagaaagaaatgaagggcatccacattggaaaagaaaaagtcaaattattcttgtttacacatgacataatcttatatttggaaaaacctaaagactcaaccaaaaactattagaactgataaacacattcagtaaagtggcaggatacaaaattaacacacaaaaatcagttgcatttctctatgccagtagtgaacaatctgaaaaatacatcaagaaagtaatctcatttacactaggcacaaataaaattaaatacctagggattaacagaagaggtgaaaagtctctataatgacgatgataaaacactgataaaagaaattgatgaggacaccaaaaaatggaaagatattccatgttcatggattggaagaaccaacattgttaaaatgtccatactacacaaagcaatctacagattcaatggaatccctatcaaaatacagacattcttcatagaaatagaaaaactatcccaaaatttatatggaaccacaaaagaccctgaatagtcaaagctatcctaagcaaaaagaacaaaactggaggaatcatattatctgactttaaattatatttcagagctatagtaaccaaaacggcatggtactggcataaaaacagacatatacaccaatggaatagaatagagaacccagaaacaaatctacacacttacagtgaactcatttttgacaaaggtgccaagaacatacactgggaaaaagacagtcttttcaataaatcgtgcttggaaaactggatatccatatgcagaagaaagaaatgagacccctacctttcaccatatacaaaattcaaatcaaaatggattaaagacttaaatctaagaccccaaaccatgaaactactacaataaaacattagggaaactctccaggacattggcccaggcaaaaatttcttgagcaatatttcacaagcccaggtaaccaaagcaaacatagatgaatgggatcacatcaagtttttctgtacagcaaagaatacaatcaacaaagtgaaaaggcaatcaacagaatgagagaaaatattttaaaaccacccatatgatgagggattaatcatcagaatatataaggagctcaaataattctctaggaaaacatctaataacccaatcaaaacatgggcaaaagatttgaatagacatttctctaaagaaggcatacaaatggcaaacaagcatgtgaaaggtgctcaacgccactgatcatcagagaaatgcaaatcaaaactacaacgagatatcatgtcactccagttaaaaagccttatatctaaaagacaggcaataataaatgctggcaaagatatggagaaaagtgaaccctcgtacactgttagtgggaatgtaaattagtacaaccactacagagaacagtttggaggttcctcacaaaactaaaaatagagctaccatacaatccagcaatcccactgctgggtatgtactcaaaggaatggaaacattgtattgaagagatgtctgcactcccatgtttgctgtagctctgttcacaaaagccaagatctggaaaataacctaagtgtctgtaaacagatgaatggataaagaaaatgtggtacataaacacagtggaatactattcagccataaaaaagaatgaggttcagtcatttgcaacaacatgaatgcaactggagatcattatgttaagtgaaataagccaggcacagaaagacaaatatcacatgttctcacttatttgtgtgactgaaaaatcaaaacaattgaacccatggagatagagagtagaaggatggttgccagaggctgagaagagtagtagggggtttggggggaaggggggatggttaatgggtaaaaaaaaaaaaatagaatgaatgggacctggtgtttgatgacccaacaaggtgactatagtcaatagtaatttgtttgtacattttagaataactagaagagtataactggactgtttgtaacatgggagataagtgcttgaggggatggatgccccaatttttatggtgtggttgtcacacattgtatgcctgtgtcaaggcatctcatgtgccccataaatatatacacctgctgtgtactcacaaaaattaaaaattttaataaatgttgattgtcctatttaattattctcaactttccgattttatttcccatgtaacagtgttgttttaggagagttttacttgtacatttatttatttacttataactagcaagtatgaaggcaagagactctggcccagagcagctgtactttcctctaggtctgcatctccagatggctctctgccatgtcctggcaatggctcttgtagtttctgcatggccaaccaggctccaggtagccttcctggttctccctgctactcaggtacccctcccgcaggctggtccagtgctctgttcttcctctgtcacagtactcatcagtgtgggactcttcccttgactctatccagacccctgctttgttcagcactgattgtcatgcctagaacaaccgttagctcataagatgcactcaatactccccatgcagccatgagcaatgcctgactgtgggtggcagggctaagcaattattcctggatgtaggtccacagcaggagtcagcatgtcacatttggccaaggactttgggagaggataaattcttaaaaagttgctatgagctcaagttacattggtttttttgtttgtttttgtttcttaagtagcaggtgagataagacattccagagatagagtgttctttttttttttttttttttgaaatggagtctcactctgtggaccaggctggagtgcactggtgtgatcttggctcactgcaagctctgcctcccaggttcaagcaattctcctgcctcagcctcccgagtagctgggattacaggtgtgcaccaccacacctggctaatttttgtatttttttagtagagatggggtttcaccatgttggccaggctggtctcgaactccttctgacctcaggtgatctgcctgccttggcacctcaaagtgctgggattacaggtgtgagccacagcactcggcccaagatagagcattctctagagcagcagtctccaacatttttggcaccagtgactggttttgtggaagacaattttgccaccaggtcaagggtggggagggcggatggttttgggatgaaactgttccacctcagatcatcaggcattagttagattctcataaggagtgcaagttagatccctcacatgcgtagttcactggggttcacatcctatgagaatctaatgccaccgctgatctgacaggtggtagagctcaggcagtaatgctcgctggcctgcagctcacctcctactgtggcctggttcctaacaggccaccaaccggtactggtccatggcctgggggttggggacccctgctctagagcattctagagacgtctatatacttcgcattctgttactgaaagacattcaattagttcagtttcagagctctgccacagaaccaccttcagcgaagattcaagtgctgtaaatgaggctggatccagaaccaggtcccatggaaggaccatcatgggagtgggagtgggttcagaatctagctttcatatcaggagataagtgtgactcagcacactctggtctggatgcctctgctgatcacttccctagactatgtaagagcactctgtgcctcaatttccttatttggaaaatgaagagaataagcacacatacttcatggggttgcatgagaattaaaggaactagtatttcatgaagtccatagtgcctggcacacagtaagtgctacaaacaaacaacaaaagagcctgtggtcaccttctagtgcatcttaactctacccccagcacaggcttaacttcccaagaactgcagcgcttcccccagggcagaaagccgtcttcctcttgctccttcctctctacctccactcttagttgtgttccttgggacccagaatggttttccagttcttgacaagtcagagatacctcagtatccatttcctgtctcagattctgagcttccgagggtacagctactttgtaaatggctgcactcagtatataaatgttcattgaatgaatgaatacatgcatgaagcaaaggcggagcccacttaaaggaagcctgtggctttgtcattggtttcggaacttctcagccttccttttatcctccacttggatcctctgcctctgttccatgtccttgatttctagctccatggcaaaggagtcagttttctgtctgtccttcttgtctttcatttctctttcacccctgattattgtcctatggtccttaacttcacatcctgaagcctgaagactagtgtctccactcaactccttggctggccagggctctgggtgtcttgctaactggggcccttctcacctaggagtggtgcagtcccaagcgtgcaggctagagggcatcatctgttccgacaaggtcagtagtggcagaagcagcaccttctcacttgggccagaggttcagctttttcagaccagccgccctatgactggggagaaagaactcaagacttcacctcttcttcctcacctcctcaatggctccaaaatgtccctcacacctcactcaagaagagcaaggtgtaagtctagatgagatacccctgaggcagagtgcaggcagggtccttctgataccactaggtggctagaaatggtgtctaatgtgaaagttgttggatagtagaaatctcagtctctctgtaggaaaccagtgaatgaaaaagtactttgaaagccagagtttgagatcagcctgggcaaaatagcgagacaccacagctacaaaaataaaaaattagccaggcatggtggtgaatgcctgtagtcctagctactaaggaggctaagatgtgagagttgcttaaacccaggagtttgaggttacagtgagctatgactataccaccgcaccccagcctggatgacaaaacaagaccctgtctctatatgtctctctaaaaaaaaaaggtgctttgaatttgaaattagggaaacacatcagtaagcaagtcagttgacctattatgatggatgatgttggtctagattctgagtgggttaccaaaggaaaacagtcactgattcttagaacgtctcagagtgtagtttctcaagttcttgctcacagttcattgcaattccaccgtttttttcaactttcttcaatacctgctcctgaaccccgcccagcatccccgggtcaccatacctcaggtacaggaggtagaagtgctctctggcctcaggaattttgttccatttttccttactggaaggagtaagggttcttctgaccctgccacattctccatcctcaaagctcacaaacccattagtctgtcaatgggtttgtgacatactaacccttgctcaaaccagactttctctaagaaatctcagataccctccttgcccctcagaaggaatctcagtgcctttctcctctcctcacccaaatgcctattataaacatagactgaattttttaggaatgtcctgataacaaaaatccttcccatcatcccctttatgtcgcctcatttttctcagactgtgtgtcacaactggggagttgtggtcaccatgcccacaggtattacagcaaagcctcttaaccttttgtgtgccatggattcctttggcatgccagtgaagcttatgaactcagaataatatttctaaatgcataaagtaaaagaaatagggttataaaggaaaccggtagtagtaaaatacagctatcaaaatgtggaaatgacaaataggtaatatatatgtgcttctttattaatgcattaatgcatgatctagcagtaggcctacaaactgctgacatttctaagtagtaatgaatataagtgatattttgagatacctgaaaccactgtaatgtgatacaaaaatatttgtgatttccatcagtggcaaagtcattggtactgctaatactattgtggtttgtatttgttgcttatccttataattgaagaaaatgctgaatttcaattagaggttagcaaaaaaaaaaaaaagacatagtgtcttctcatctaccttctcccaagttaagaactcctgcattagagggtctgttgctttcatgatgctatgaggtcccatggaggggggtcccaagagaccacatcttttccactttggtagcccttgggtcaatccagctcagtgctcacacatgggagactctctgtgcttgtttgtgaaattaaaaggaaaagaactggctgggtgtggtggctcatgcctgtaatcccaggactttgggaggctgaggcaggtggatcgcttgagcctaggagtttgagaccagcctgggcaacatggtcaaaccttgtctctactaaaaacacaaaaattagccaggcatggtggcatgcacctgtaatctcagctacttgggaggctgagtcatgagaattgcttaaacccaagaggtggaggttgcagtgagcagagatcacgccactgcactccagcctgggtgacagagtgagactcggtctcaaaaaataaattaataaaataaaataaaagggaaagaactggtacatccctactctctcaggtgaagaaactgttaagtcaagtccttgtctggatttttgttcccaactccaattccagaggaggaaataaatgcccagtgtctcttgctctgcaggcacggggcaggaggaattaaccaactttggggatccagctatgtcagaagaagtctcaggagaaagcctggaaacaagttgagctggttaaacagagcatgatgaaaaaacgcaggaaagggaaatgatgtcactcatgctggcagctttgaggacaaggaagcgaaaatgtacgcttctgatagtcaactaccccgcctatcccaccctgctgtctcccaggaaggtagctggaactgcaagtggggcaaagctcccagcactaccagccagtggcaagggccttcacctgcccaccttttgaactgaggtttttcctccagcagaaccgaaggcccatgtgcttccctgcaaagtgatgcaactgggcaggaagctcagatgccagcaactgtgatgtcctagatagggaaaaccctgcattgcaaactcaggtcttgctttggaaaaaaaggagtggctggatttccttcttgctgtctagaaaattgtttcctgcccaaaaatggcttaattaggaagctgagtttgtttcctaggaagggattctccttctcttccttctgcgcggcttacctttacaatgccactggcaccgattatagcctgactcccgggtttggaacctcactttctcaagctggcttgatgtgcccatgaaatgtacccctggcttctctaacacagttgcatcccccatctgttccactggagcactagcaaggtgccaagcacttgctgcccttgaagaccccatggttcatgcgcagctattcccacatctctcccccactataagagtcttcagtggccctatggccttaagggggaaaagtcaagaattacagaattaagaaagccaagtagaaaggggcttaataaatcatttcatttgttttcccataatttacagataaggaaaggaagttattttaccaagaccacacaatgaggtgaaggtaaagctagagctagaacttcagtttctagactcccagatcaaattcatattccttggtatggtattcttggtcactgatattatagccatatttccaatttgattctccatggcttctccccatgaaaccgagctccagccaaacaaatctatttgccagtcctcaagtaccttttgggtttttctgtcctctcatttctgttttgagtgtcctttgttcaacttcgccctcctctctatccctccctagcatctctgctcatttaaattctgcctacccttcaaggcttatctcaagctctgctatgtgatagtgccctcctctgtgccccttggcacttaactttctgcgcactcagcagtactgatcttggttctgcaaacgtacctcttatcctccaacaaggctgtaggcaggtagtggccagagacctgcccggggcatctctgtaatcctcacagcattcagcacagtgtcttgcacatagtaggcatttaataaatatctattgaaagaatggcttttaagatctatcagacacaaggatgataaaaatgatcttatgtgtctataggtttatataaatatgcatatatatatatataactcctgggtgaggcagacagacgatgtaggtgttatctccattttattaatgaaactgaatgcccgaaaggtgtaaaaactagacttgggtcacccaagttcaccctgaaagttggtaagaaagtgaatattaggattgggtctcctggctctcagtcccatgtgatcttcagtgctaataccctctacattgtttccactgaagactcatttcttctaccagaattatgagatgggaaaagcttccttctcagtctcatttttaagaaaagctatttactataggagtttctcatgcgttaagagtgtcatgtactggaatgaacacttactgaatacaactttggggtctgccttttaccagttgaatgaccttgggcaagtcacttcacctctctgaactatggtttccccatgtatacaatgaaggaattagactcgtacttaaaaatcacttcttgctctaacagtccaggaggaatagtctatcattagataaggaaattcttgccattgaggtag

SEQ ID NO: 3 - DNA, 181089 bp, Homo sapiens
  misc_feature (1)..(181089): dna:chromosome chromosome:grch37:1:206853401:207034489:1.  an example of a reference genome for IL-10
aggcagccgttaacaccttcagaaagagctaagatagaagggatgatagaggccatcctgaccaatattttgaggtcattttctgggtcagaaatttttgtgactgagtcttatgtatatatatctgtcacttttgctttgggggaatttctcattttatcacagaaatactagcctatgacatgaagactatttctctctggctctaagccatttttctttccaagagtgggtttttagtggacagagcttcttctgtaaatcatgctccttcttgcaatattttgtttgcggtactagcagtggatacaaaggctgctttatctgtgttcatgcgcagatccgccagcctgtggatgatcctcactcatcaagagagtgttagctgaaaatttccaagagatccacctccataaatttccaccctctgtcactcattcataatgccacgtcatagtaaaacaggaaacttttactccatgatggtgtgaaggctgtgtgggggaatcttgaagaaaaagattgtcacaatgtatcctatcatataacccagtcatgcaaattaacatagacctatattctgtaacagattaggccaagatggaaggaaattgaggtgtggaaaatttatgttgctctaaaatggaaagaatagcccatacctcttcaggcaattcctgcccagaaatagcagatatcatatttctgacattaagaaggatatgtgagtatatgtctgctcaggatctatagtaaggaccatgagcatggactttgggtcagaaagatttgggtcctgtccttcgctagtggaatgactctgagaaagttatttaatttctctgggactcagttttcttgtttatacaacagataagtgaggataacagtacagacctcatagggctgtgtaagagtaggataaggtttggctgtgaatgatagaaaacctagaccatcagtcacttcaacaagaaggccatttattgttctttcatataaaagtctgggtaggtggctcattgctgatatgatggatccaggttcaccagtatacagactctttctgtccttttgttctgtcttcctcaacctgtaacctccaattcaccatccaagatggctacagctgtgaaatttttattccagtcagcaggaaagaaaaaagagaaggagaagaagaaggacatacttctttccataaaccacttccacttacaagtcattggttataacttaatcttatgaatgtaaccggctatagtggaggctgctcaagtgggaaatgtaatttttattccaggcagtcttgtgcttagctaaatatggggtgctctttactatcaaagagaggaaaaaaaggtgttagcccacccaactagcaatctcagccacggatcatcatgagatttaaatgagacaatgcaggtagagggttgagcacagtgttgggcactcaggaagcactcaaaaaacattgtcatcgtcatcatcatcatcatcatcaacatcatcatcaccatcatcatgagaaggtgaggaatactttgaaactgtgacaaggcattttcttattttaacctggtcttgctgctaacatcacccttggccacctcccttttaaggtgatttgagtttcatcttttatgatacctttgaacatgccttcatgaaacaaaactatataaaaaggaaagcaagggaaaggtgaacataggactcaggatgatggggtcttgggccatgaaaatggaggggttgggggagtgtgtgtggaggaatcatctagttagatgtaaattattgtcgaagttctagtttttattttgggtagtggattcacaggtgcttactgcattattaaaaataattattaactaacaataaaagtggagctgcatggatcaatgatccaatgacgagagtgtgtcatgaatcaaggattataattaatccatttctatgtacctgaggtccttaaattgtctttgtgtgtactatattgcatggcatatgtgtttgcatgttaatagtagataaaaatagtactttctatttgcatagactttcaagttttaaagcgcttttacacatccataaaaactgtttattaagtagttcattacagatggctaagagcctggtgttacacaaataggactttggactgcttcctgtaggaaagtttttattttatccttgcacaagccctacaaagtaggcaaggcagatgttattgtcactattttgcagatgagaaggaaggaactgagagagcaaggggctctcatgaggttacatagcgagtcagtatcagaatggaacttaagactcaggatctcttggccagtgcttctgcatttagcacatcttactcctcaattattcatccactaggcgtttattctgttacatggcacattgtgctcatgtgttgtgttcatatatgtgtgtgttttctggtgctgtgtgtgcagttcatataatctctatccactatgtatgtaccctcagagtccctgtgtgccccctaggcctatttggctcttgcagctccgggaggactctcaggtgggaattcagttgtcctgttattcctagatcattgggcctcaccatctccctggagctccagctaggtaggaaagcagctttgatatcaggaatagatccgtaggccatgagcacagagcagaggagcaagccagcaatgtctaaataatggtgatatttaatatttcatgataatgtatagtttatgctttaggatgtgttctcataattactatttcattttattctctctcagccccgaaagtagattttgttgtttttttcttttctttttcagatgctgagagatgttacatgtcttgctcaaggtaacccagttggaggacagtcttggcttcagctcatttgtctctagatcctgtcatcttaccactgtgccttgctgcctctgaaaaggcagaaggaagttattctctttctagctttgtggagaaaagcaggtgatacctcaacaccaagccatagggagcttccagtgactctgcaaagaaaaaaaagaccaactcagactccagagcagccccaccagagcctgagcagttggagccttccaccttcccacccctgcgttcctcttgtccttgggcatctcctgtgtgtgcttcggggaggtgatagcagtgctatagaagtagtggagtgaagatgttttcctatccccgtggccttagatagtgtctttgtctttgaagagtcaggggcatctggggagctgtctaaccgtatctatcctgtagactcgggaggaagctgctggctgctgtagacagaagagaatccctgtgcttcgggctcctaggaaggtgtctgccatcctctctgtgccactgttatctgtcttcttccccatcagataacaccatccaccgctgcagggctgagcacggcaccttgtacatggagctaagcagatgctgcttgagaagagcatatgtttgtgtcgggggaaacatgtctctccttggtccacagagccctacctgccccaggaaaggacagtgttgggagggtaactcccacccctcactcctccccctcattcctgcctccacaagcatcttctgggaaaggtgaatgagggaagagacatttgcacttgtcccttacctacctaagttctatccccagtggccacttctgggggtgttgtcttctctctggagttttgggggacctattagggggcatgtgtggccataggtcaagcctcattctctaactggccttaccaagacttaagctgaggttttgtgttcacctgtctgggttgcttgccatttctcaaatgttctgccagtcagaggtgggaggaggtcggcaggaatgtacttggtcatctcgaaccccatcagaatgtgtgtggaggcctcctggcagcttctatgcagggtccagctagatccctgggcttttcctgagatacacggggctaacccacttcttacggattaatttttccacatcggaaatcagaagccattccccagggcctccccttcagtttcattatctcctttgactctgcccacaacctttgaaaaggtctcgctgttcttcccacggagagagaggtgcaaggcttgctcagcctcacacagccaatccgtggcaaaggatggcgggaattcaggtggccccaatctcaacccatcctcttcccaccctgtatcctttttagtttatttacaggaaaacatgttcaaaggtataattactaaagtgctcctggttacacaataatacgtctttactgaaaaacaataaattaatgagaaaagagatgcaaaaaacctcagaggaaaatgttgaagttagggaaatatttaatacgcccgcctttggctcacaccttttcctgggatgaatgacccctgtgattccagctcccccccacccccacgaggtctcatctagctggatacctacaagccatccctgtccttggaaatacacccctctcccaattcgctgccgctaagaagcccagacaattggagaggagtggattttccatctgaattatgcagctcctttgacacgcctcccctctccctttgcatagccttggttaagaactagcatttcttcgtcccctctccctgtcccctctcactgtccgcgaggcagcagcccccagcctactccgcgatcctcccagctcccggcaccgcgcgtcctcccctttaaggcccgcccctccccccacgccacgcctccccaggccccgccccccgcccctcccctttaaggaccggccccggacgcagacgaggctgtgacgcggccgccggcccggggctgggtacattgtcgcgcggccgcttccccccggccgggcccccgccgccccgcggtccccagagcgccaggcccccggggggagggagggagggcgccgggccggtgggagccagcggcgcgcggtgggacccacggagccccgcgacccgccgagcctggagccgggccgggtcggggaagccggctccagcccggagcgaacttcgcagcccgtcggggggcggcggggagggggcccggagccggaggagggggcggccgcgggcacccccgcctgtgccccggcgtccccgggcaccatgctgtccaactcccagggccagagcccgccggtgccgttccccgccccggccccgccgccgcagccccccacccctgccctgccgcaccccccggcgcagccgccgccgccgcccccgcagcagttcccgcagttccacgtcaagtccggcctgcagatcaagaagaacgccatcatcgatgactacaaggtcaccagccaggtcctggggctgggcatcaacggcaaagttttgcagatcttcaacaagaggacccaggagaaattcgccctcaaagtaggtctggggcccggggaggggaggcggggccggtcccgggccctggagctccacggcgtcgggtgcccgtcccggcctgggtcgcggcgcggggcggaggggtggccgcggcggggcggggcggggcggccgggccggcggtgccgagtgcggcgcgggcggcgggtcccagcgccctcgcctccctgaccgcttccggccgctcccgggcgggagccctgggacccgctcctggggactcaggggaccctgccattttggggtttgagcgggatccagccgagtcagaacggttggcttcgggacttctgctaatttcactccatctcaaggaagtgattttggggttggtggttccccgtcctctcctccctcctttttctctctctgcgggcacaaaaggcccattactcattgagccggttggtcggttggtttggagaagtcggatcgcagaggtttatttagcctcgctccttatttgggagccggaatgtgtgatttcacttccccgagcctcgcgagggcagccgggccgccttggggcgcgccgggcaggaggtgtgcggcgggagggtcctgggtgtcccccggctgcgggggcgggattatttggatcccggagctggccccctcagctggccccctcccacgcccgcgcggggcggctccggggagaggccggcggtgtccgcggcccggctgatcattgtgaacagagtctgtaacccgcggccgggcccgtgctgattccgcctcctagagagggccacttgctgtcctggactcgcgccgtgatgggcagtctgaggaaacattatccttgagccgggggagcccatcccttttctttctttaaggggtgtggtggtggggagaataaggattcaagtgagaatatcgacttcagaagttaaacacaatggactgggaggtctcatgagatgggtgggtccgcagtgaagtgtgagccggtcttgcagggtcaccaacaaggttttcctctcacaggggtttcaggtcaaaccaatctctaaaggtgacgcctcaggtctgtttcccctggggtgtctcaatgattggaggaggagaaaaatacttcctgtgttatatttttctcttccccttcagcccccacagcgagctgtatttcagttgtcaagtacaaaactcagaaatgtggtatgggtggaactattggaatatacgatcagatgttttaaaagaaacaccagtacttcggggttgtacggggcaagcatgttccatttctagattttaaggcctctagaattgttttcctgctgctctcatactcaaccctgttacagtgctttgctttctactgtaagttattgctctgggatctcggttgttgtttagtgttgactgttggagaggggataagtatcttcaacacttcaacatttgtgtcttagacttctctttccctactcataactgaagggaaaggaggaggaggagttgtttggattgagcatggctctgaccttggggactggagttgggtgaatacagtttgaccacagttaacctgtatcattgaggaagtgacagacggtctttacaggagtgtttgctgtcccctctgagacaccatctgccttcacccattagtagtttggggacactggctgttcattctcttggatatttggaatattatgtaaagacttcagaacaaaagctcccaacttctgctctgtattctgtttaatagacacacgcacaaaatcatcctataaaatgcttttgagtggcaattcagatttctcttgtaactaacgagagagaggtttacatatttttctactttgaatagttttggaaggaaaaatccagcagcgtgttaaataacactcatagtttatccctctcaggttagaagtgggcgaagagtgaagtcagtctgttttgacaggcagcctgctcccagatcttttaagttgactcaactgttaaattgtggatttcccacacacgtctttgtgttaaaacttaataatggaggaagaaaggagagacaaggcatttggagactgacagcagtgttaacagcacttccatatccaaatattggctgagacataattacagctgtggggggaatctggttcaaagaacgctgttccagagacacacaccaaagagatttctagatcttgaattttgattaacctcaggtgctgagtagtgaaatggttttcaaaaccagaagtctagtgattataaagcaggagaggaagatggagtggggcaagagggattacccccttgggaaggtgcctgagaaaaggggaggagacctctattctacagtgtgccgaggccaatgctgggggctagggcagagctggagggcaggagcccagcctctgctggggttcagaagtctgctatgttgcagccctgagagttgatgggagctggcagctgcttagatgctctcctctctgcctatagtcggtgacctcttagccctgttaagtgaaatcagcatttgaaaaagagtcccagctcaccctgctgcttctctccctccacctcagagagctcccatttaaatgcttttggtgggtgctttgacctcacctcaccatctctcctggctgcttttgctaagttctgagtcatgcttccagtcagagttgcaagggacttgaaaggtcattttgtccagcccccttattttgcagaagagaaaaccaaggcccagagtgagggagtgacttgttcaaggtaccatagccattcacttggcagaggcaggattggaacccaggttgcctgactcccagtctcaggcttcttcccacttacttcctaactgagccacgggctcaggcacatggccacctgctgctccagggtgcttccagcctgaggagctgttctgtcacctcaggccctgactgacaagaggggaggtcagcgaagggggctggatgggtatttgctgctcctgagaacagtccccaaagttggaggggaacttcaacagtagcttcatgcatttttttaaccactccctcccccttttaagagagtatttgataggcaccttacttactattttttgtacaagaacatgggaattctattatttttatttttattttttttgagacagagtgttgctctgtcgcccaggttagagtgcagtagcacgatcttggctcactgcaagctctgcttcccaggtccacgccattctgcctcagcctcctgagtagctgggactacaggcgcccgtcaccatgcccggctaattttttgtatttttagtagagatggggtttcactgtgttattcaggatggtcttgatctcctgacctcgtgatctgcctgcctcagcctgcctaagtgctgggattacaggtgtgagctaccgcgcccggcctgtattacttctttgataaggacacctagtctcaacccacttgtgtattaattagttgtattccccgggagggttcctcagctgcttgccgcttcactgtgtcatggtgacccttaggtgttagctcaacaaatttaattaaagactgtatcgttgttctctgctgtgcaactctgattaggtgaagcatgttactgctttataaaatatagaatgttgtcgtaacttatctctgtgtatctttccattgcgtggattagagaaaacaaggtcctgtagtttcttttcctttcctttctccagcattcctctctccctaggtcatggaagtgccactgcgatgtggcttcctttgttctggtgaaggggagatgattggagcctctcatgattattctggatgctgttggagggaaatgccagagctcccacatccccacagtacaggcaccatctcctttccaacacacctcatactgtgtacctgtggagggcaagacagttagtgtggctaggtgagaggcagtgtcccaaactggagtttgctggagttgtcacaaggttaggaaaatttcattgaccaagccagcctcttttatatgcaatatggttacaggtaggtaacagtttgctgaatatctatcataagcttagttgcatggaggatacacatgtaaaaaatggcctgtaaaattttgagtcaagaaacttatttagagaaggtgaaattaacacatgtaggctagggctgcactgtccaatctggtagccactaccctcacatagctaattaaattaaaattaattaacatgaatggattaaactaaattaaatttgaaaaatcagttgctagccacacttcaagtgttcagtaaacatgtggctaatggctatcgaattgaacaatgcagaagaacattttcatccttgcagaacgttctcctagactttgttggtctgggagctaaatcgtgtggctgggaatagaggagctttgaaagaggggaatctgtggtgactccaggagctaagggaggctccagctggggtcagtgggacatggctgtgcctctgaggagtgagcaagtctgtgagaggtgtggtgacattggcctggctagaactgaggggaggaacaggaggtcagagtggtcaggggttggtggctccaaattgaagctaactcatcttgtgtcaaagcaggctttaaagtgtttgaggggcatgaaggtgtcaaaaaaggttaggaatcattgaagatgggcttacagaattatgagggaagggtcaggtttgtggtttcagagatcctgtccctcctggccgtagccctgaccccagccctgacccctggctcctgcagcagggcccttggcatccactgaggcaagattgaagctgggtcagctcactgtccttttttacttgtgaattctgggctttgactgagcttggagacaatctccagctaagatacgggatcagtggctgacaggaggggagagacaagcagtccctgggccttagggccaaatattggtgggtgtctaggaaacaaaagaacccctttgtgggaggaggaaggtattgggacctgtgatgtttctgctacttgggacctgagaggttgggccatccataattgatgatttttcttatgaagcaggtacaggggattgggaggagggcctggaagagcccagcctcagaactgctggaggcaaacttaatccttgggctaggggaggggccaaagctcctgttagccagagcccaggagtgtgctgagtgggtgccaggaggaatgtcagccaagatggggaagagcagggcacagtcgtctgcatctgagccattgcccagttcccaagcagccttgccatgctctgagctggggttcttcctggtggcgtgatgtctgtggtgcaggattcactctattctcctacctttcctctacttcaggccctgccaagtgtcatgtgaggtctcttttccccctcttccctgcactgtatctttccagatggttctgtgtcctggagggaggtggatgggcagagaagagttgttctttgcagggactgcagcttttcttggtaatggtttgaggcccagtggcaaagcaacccacacttcatagtaacttagaacccacactccctggtcatctttcttgactccttgcacatcactgaggaagaagctggcctagtgcagaaatgttcagtggcatgtccaaggtcttacatggtgtcagcatccgagccacatcttgagacctggttccctgggacctgctcttggtctgggcccctttggtttttggttgctagaagactgtagacctggtggagcaaaactgagctccactaacgcatcagctaggatctttccacatgggttaccttgtaaatgggggcattggtgaagagaaggggccatgtcactggacagtgtaataacgtatggcagttatagaacccaaatcagattgctgtgtaccttttctagtttttaggaaaatactggtattttgtattttaagatatatatatatatatatatatacacacatacacagatatagatatgtagagatgagcttgttaccatgggttatgtgctagataagaaagcaaaaataagtgcatacataaatagaaagcttccagtgtttgtatgctgctaacaagttacatgaccttgaataggtcagctaaactttccaggcctcattgcacagagggtcggctcgagcagctcctgagcaccggcagggtgaggcagtagaaggcggtgctgcaggccagaggtggagggcaggcaggatagcttgctgacttgctccgggtctgaccatcagcagtatctgggtcagcacagatgccctttcgtaagcttagtgcctggctccagggcagcctgtgtccagttaatgaataatcatcactgaccagctgctccttctcttgtgtgaagacttagaaagtgttctatgctggtgactcggcagagaggatagactacgtaatttagcagggtgtgcatcttctctttccttaaaatcagaagaatcatagtgtagtggtggtgcaaagtagagatgaggaactctattccctgtttgagattcctttctcaagttatggggcatttgagggccactgtgatttctggtgcaggctgttccctgtgcacagggatctggttgaggagctaagcgaaggctgaagtccagccactgtctccttgcttggctttgtctttgtgtgtggctgggttctttcaaaggagtgccttctaattcaccaaaggtatggttatggattaggggttgttcttaggttagagttggggactgattcacagagctgatgaggaaattaggatttacattcaggtgaccctcagcccctcagaccaggctgagtaagaagagatatcaggaatccaaggaagcaggaggaaaaggggttgcctggtgatgtctgttctctttcctcctcttcctgcccatgcaaggctagagcagctgtttcagccccggaggtttagactgtggggtcctgtgtgctgggccatcaggtttggtgggaggaggaagaaagccacagtagaaggagacataaagttgggctgggcctctggcagtgaaaggttcttggggtctttattgtctgatcagtaaacacctctgtgtgccagaatgagctgggacaaggccccaaggtcagcccatatttgtatctggtgttctcctccaagaccagccaagctgtgcgctcattctgctgggaacctgagccctccaaaagggtcatatgaaagggcatcttattcttgagggacgtttccaagcatctctgtggccagtgtccatccaggactcatcttagaggtgaagagtggtggccagaggcggaagctagtggccacccgatgggagccttttctgtttcagagcatatgagggagctgagggagctgtactgttgatgccttctctctggctcatctccatgaagattcttttgaaccagaagcaaaggtgaagtctctctgaggggaggggctgaacaggagatctactgactgtccccctgccgactcctccactttcgtcctccggcggggctccttatcctcctgcttgtctacagggagaagatcgagttgttcgtttgctgccattttaatgatccacattgttaggaggctctcagtacacaccggaccttagcagcctggcctcctgcccagggcccagaactgttactcagcccctctgccgaacagctaaaaataaacctgccactgctgcagtctcccctcacagccaggccctgttagctgtcccagtgcttcctgccacaccgctgacctgtttctctcactttctgctgatattctccctgcttgcccctttctcttccagcctgagcttggtaggtgatttggggctaactcactcttctgagtgctgggagacgtgctatggtttttatgtctccaggtgtctagatttgtgtgtatgaaagctccgtgaagctgtcctgcttatttcccagtagggaaagggttagacaaaaaggagagtgaccaagctcatcagagtggatcagaccttctactgtgctcgcctccagccctggcttcctccagttttacctccaagcaggcctctttgccagagttacctggttatggtaacagagttaccatagttatatgctaggacagccccacatgggcagtctgccccaggccttcaacccgactgccctgtcaccgagcatgctacctaccgtgtactcctgccctgttgctacgttatattctccacctccgcagtgtgaggctttgggctaccacattcaaaagtgtgacctcatcttgtcagcgtccaagaataactgggccctggctctcaggatctccttcctgagtcaggccatggcacctctggcccttccagctcagccacatgcagaatgtcaccgagtgcatgggtttcttctacctcttgactgcagtattgatgtgtgtccatggaggtgtggcctcttcctctactccccagggatcctggagacttgtggagcaagatgaggaaaggggctcaggtagctagaatatttgcttagctgatagatactgggcagagtctgacattggcattctgttcttcagcgtggcgttagtattctttctgattttttctaatccctagacaggtgttgatactaatcgtggcctaggagggctctatgtctgctttcaggaattatggtttatttgggggaaggggtgtatggtggagagtgatggcaatgacaaccaagacataggacttgaggaacccactgccttcagctagagttacatactctgaccatgtgtcgatggcctccttctcccacctctcccctggggccacatttcctctgcaaggaaagatttatctgccaaggcccattggcctgtgcagaggaagagttgggcatagttgctaagtgtttatttttaactctgacagaaggagcccctgtcctcagaatagccataccctctgtctttccctatcccgactgccttccttggcttctgtgattcctagaagaaggttagtaggattctaaaggccaggcttcacgggagctggagaaggctagcttctctaagtgaggaatctgcaggttgctcgtcatgcttggcttctgcagagctcaaagggtcctgcggggagagccctggacactaaaggccgtgtgtctggaacttggagaattctaggaatgcaggtgacctgatgaggaggctgcatgtgccctgcagctcagagcagcctggctgcacagctgagttggacagcccagcaaggggtcatcccataccttctacatccttacaggcacccagatctctggcagatggggaggccacagggagaaaatgagcatatgtagtaacctgccctggaaacacttgcgcttgcagacacgccaagtgctgtcattccctctgactgccaggctcacgagcatcatgtcctttccagcagagcccacctgcgactcttagtgacttcataccctttgtgttctcttcccctgatgtgctttagtgacctgtgctcacagagaggaggaggaagggtggcagtgccccctctcctgggtctcagactttcctgactttatgcatttgatttggctacctgggctcggatactttaaaagaaaataaaattaggtttgaggtgtaaccagagagagaaggaatagagagtagtagggggtgggatgggtggttgaaacatgtggctaactctgagaaccctcagctatggaaggaaggtcttgcccccatgattcttcggcgtgcagtgggggattagtttgcccagagcccagctctgatcatgtagcttcccagcttaagcccttcagtgggtctctctgcctgcagaatacatgagatatccacatctttcccagatctggccctgatctgtttttttttttttttttggaacacatgctttttttttctccccagcttaagtggcttatatatgttgtttctttaacagaactgtgctttccacccccacaccttagcatctatccatctgcatcttctctgtaccatgcctgtcccccgtcctgtctatatctaccttttccaccctgcacagatgctgcttttccagagcctttcgcaccaaaagtgggtcttcccatccttccccatcaaacttgctgatacactcttaccttttatttctctgtttaagtgcatttctccatgtgcaaggcatctctctctctctctctttttttttttaacaggaaggtaatttattaacggaaaatatttgaggagtcctgtgcacagtgaccatggcaaccccccttcctgcgggtgctgtcagaggggttgggagtgacgtcctcaatctgtccgatcttcatacctgagcgggcaagggccctgagggccacctgggccccaggtccaggggtcttggttctacttcctcctatggctcggagttcgatgtgtagggcagtgatacccagctctgggccacatcccgggcagccaacatagcagcatgtggtgaggattcatctcacctgccttcaccttcatcctaccagtcacacggcagatgatttctttgccagaaagatcagtgacatggacaaaagtgtcattgaaggatgcaaagatatggcagacaccaaatacattctctccttcagccacctgaggtctgaggctgatgacctgttcttccttcttttccttcccctttcaaggtgccatttctgcatgttgtttccagactccgcacaggaacgcaaggcacctctttagatatcggattggactgtaaatcccctgaaaacctacatcttcattatttttgtgtcctcttattttcatgtagtgaccgtatgtcctcattaaaaaactcaggccaggcatggtggctcacgcctgtaatctcagtgctttggaaggacaagtgggaggatcttttgaactcaggagtttgatatcagcctgggcaacataacaagaccccatctctacaaaaaattaaaaaggttagccagctgtggtggcacatacccatagtttcagctactcaggaggctgaggtgggaggatcacttgagcccaggaagtcacggttacagtgagctatgatcatgtcagtgcactccagcctgggtgacagagcgagaccccgtctctgaaaaaagaatcctagagtattttggcactgtgcattatatgcattatacttagctgctgaataaaggtgtgataactgagtaatagtggatgccaccgatattaaatgtgatgtactagaggtaatcctcagagtcagggactgtggcagccctgggagtgggatagtactgggctgtgctctctgagactgagctggggtagagtgatgatctctcacattgtctgttctcattcttctgctgctgaaaagctgctcttagtcttctgagcatttcttccctctacccacttggatctgctgactcaagcaggcaccttctatttctgcttacagagttctcattcttacaaggaccctgaccacagtttctcattgatgcctctcctccttctccctgttccaaggcccctcctattcctgttcagtcatggagatgacccttttgccctttggagaactttaactgagggagggacagatgtggagcttgccaactttcctacagctcctggcattttctagttagctacagacacggcacagacacacagatgcagtccattgttttctatctgctggtcctgctcctgtgtgttgcaagagggacgagtgttaaacactgtattagtccattttgtgttgcactaaaggagtatctgagactgggtaatttatagagaaaagaggtttattgctcacagttctgcaggctgtacaaggatcatggcaccagcatctgcttctggtgaggacctcaggaagcttttgctcatgggggaagttgaagggggagcaggcatgtcacatgtcgagaagagggagcatgggggtgggggaggccctcgactctttttaacaaccagatcttctatgaactcagagcgagaactcactgccacaaggagggcaccaagccattcatgagggatctgcccccaagacccaaacatctcccaccgggccccacctccaacactggggatcatacttcaacatgagatttggaggggccaaatatccaaactatatcaagtacccagttgctgggactgaggtcaaaggtttgaacctcatggggctgcttaactccatgccacaacagatttacacaagaaagagaacctgacactagactggaatctgggagacctggctactaactctacctgtgtggccccaagcaagtcctaggacctgtctgggcctcactcagtttcctcattgtaaatcaacaggactagacttgaccttgaaggactcctgcaccgaaagcctttcatcactgttgttgcatccgcactgctgggaaaataacctgatgctgggaaacaagtggtcggcctgggtcccagggagcctcggggactaagagccatcatctctgtcctcagtttctgcaggacagtgttacttcacctttttcctggctgcagtgtttttattcattcagccaatgtttataaatgtttattgttctccatgcctgcctcctgtcttccctgctgactggccatcaggaggcccagatggcaggattagcttggaatggcagaacagtcaagggtcatcctcttgggtttagacccctttaatacctctgctatatgagatgagaagaatttagaacattgatccttccagcagcttagactagacccctgcctttctaagcaggatttgcctgtgggtaccttctatacccttgagatccaaagcaacttactactcaagaaaattaattagcaatgccaagagtgacttgtacagctcccctaaggatagctcaaaacagcagatagactttgatacaatataacaaatttctattattcagatcactgtaggaaacttagcaactctgtgaaggtttcccagattaataacaagtctttattgagcagatactatgtatcaggcattgtgttaggtgttttacttacattcttgttaatccttaaaataacccttttactgcaaagtgaaagtccccattttacagaagaaacatgttcatgtacagaataattccttagcaattatttattgagcacctactaagtgctaagcattatcttgggctctggatatacatcagtatataaaacagacaaaaaagctatttggggggtgggaagggggaccaggtagaggaatagcaagtgcaaaggcaaaagcctgaggcttattaataagtgtgtctaactctaaaacctaggctccctccagctcacagtattgcctctctaatggtcctttgtgactccattataattgggtacttagatgacctagcaattttaagtttatccaatatttatgggatacttattttgtgcaaattgctacgatgagatgaataagttgtaggccctgcctttggaaacatacagtttagaggaacgaacacccgtgtgtataaaaatgaatgaaagaggacttcctctcaaaatccagatcttaccatttcttgcatttttgtcatttgacccttgtaggccagatggtgtggttcctcgttttgtatctgaaggaagagtttcagggagtgggtgggggtaagtgtctgggcaccagggtggccaataaaggatgcagagacacatgatgggctcttcaaggtgggaggaagtagagggtgggatcactgcctggcatgggcagaggatacttcatggacatatacctgtgacacagccaggggagggtgcagatgaaaatacgtccagtgggatggtttctaaggagaagtgtgagggactccactggggctccgtattttgtctggctgaggagggagagatgctgcctctccaggaatctggtaataggcaatgcttgagattggtgtgaaccaacgcatcacatagagccaggagaagtcacgaaggaggcaagaaaaagaaatggctgggctaaagctgtggcagagccctttttatcctcctttgggccctcatatggcttctcttttggtctgaagaatctcatccttcttgagtttagccttctaggtgaaggagtgggcagactgcatgcagggagacagggaggccgtgtttgtgtccttcagctcaggagctgagagaacagaggtcagggcttgggatggagctgaccgttagtgcagatgggaaagtgaagcaatgggtcgggtctgtttgttcctgagcatgtcctgtgacaaaggaagttgcaacatgtctgtctgtctttctctctctttttcttttctcctttcttttcgtttctttctctctctctctcttctttttttctctttctttcttcttcttactttttttttttttttttttaaataaagaaagaagcaggtaaaaccatcttccagaaaatgccagaaagaatatctggtctgtgatgggtggttcttgcccctcccgctgcaatgcttttcctgtgtagtttttcttttgtccttcctttcccatccacactttccactctcctttcctctgagaggttgtgtctctgcagcaggccagctatgtctccaaagggaagtagtcagtgcttggactgagggaaccttgagagagaatcctctcctttgtcctccaggtgagagagctgttgcatccactcacacctggaaggttgctggtctcctctcgctggacactgagagctgtttaaatttgacaggtggttcctgattcccacctggcattttttgctgctgcacaggtctgtgttgtgtcttagaaggctgagggaatacttacttctcaactcagataaccaccttgttggtaggttcagtgtgtgtctgtgtcaaggcagatgctgggaaaaaagggcccagaatgtgagtgggaggtagaaatcaaggctagaagaccacacatgttaatctggagtacttggtcaggtttgattttggcctgtgtgctatagctgggcaagaagccagttgtgtttggaaatgtacagatgatctattttcctgatgaaaccttttgaggtctggaataaacatagcttgctttctctctttccctcttttgagattcaatttctctcccttggacttctataccctagtagagccaaaagttccagtacaaaccagttttgagactccagcattagtcaactaagggatgttgtaggtcatccctgagaacgagggctgcttgctctggggaagctgggaaatggcaccaggtgtcaggccctactgcccaggatgggatgacagctgctggtgttaattacgtttctgggcagaacagggtaaagtccttgggggtgagagtttttgtttaggcactgtgttccctgtacctgttgcctctggtacagctgctgcagagcccctccttgcctgcagtcttctttgaatttaatctccctgtgatccagtgcatctcttcagactggaggtgagcccagaggagtggtggagggagtggggccagaatttacttgtttgcctggatcccactgagaatacagaagctctctttcacgagaagctgtgctggcctctgtggtacccactggccatatgtgactattaaaattgaaattaagtgttaataacatttaaaattcagttcctcagtagtgccagccacattttaagtgctcagtggttagctagtggccacggttttatgtggcacagatagagaacattttatcatcacagaatagtctcttagacaatgcaagattctgagataatttttctaatcctggtagacacttagctggaaggggatttgaggaagggtacagggagaggttttgaagcccaggtgagagggcaagtagaaggtattcatttagaaaaggatcttaaaaagtatttagtttgtagggccaggtgcagtggctcatacctataatcccagcagttcatgaggctgaggcaggcaaattgcttgagcccaggagttcgagaccagcctgagcaacatggggaaacactgtctctacaaaaaatacaaaaattagcctggcgtggtggcgtacacacatggttcgatctactcaggaggctgaggtgggaggatcacttgagcctgggaggccaaggctgcagagagccgttattgcactgcactccaacctgggcaacagaatgagaccctgtctctaaaaaaaaaaaaaaaaaaaaaaaaagaggagttcaccttgttgaggactacatcctaagagatggtcacctggcccagtggctcccaaaccaggatgattgttagactcacttgtgggtagcatttcaagatacagattcctgggcaccactctttgtgtctagttgaatccaagactcttcagaggaggtaacctggaatgtgcatttttaatgtgctccccaagtgataattatctgggtttggcaaccaccaacctatcatacctgtgcttaaattcttccaatggtaaggagcttatcccttttcaagaaaaccttaccattaaggaaaaattcgctgttgttaaagttctatgtttttcgaatcttgagatttggttctttgaggtcatgaaatcctttggtgctcattgcatctttagagcctcgcagaaccgtcatcttcatccttgcactcagtcttcagcagatatttgagggcagctgtggtgtggtccctgccactccaagtcatggcatgcgtcagagtgcttgatctgccaagggctctagggagatgcagagatgcaacatcattccaggatccttccaattgtcaggccttgctgagagccagaggaaaggtctgaatctcagtggagccctacagggacagcccaagggccatccagccggtgagggccatgtgtgtgtctgcctctctgcatcctgctccgtagggaagagtccctgcttctttgcatgttagcacttgttaacaccgacctggttttcttcagagacattgagagattcagccatccattcccggtaatgacagatgtcatttctgtttagagaccttcagtagcctcccttcacttccagtgtaaaattcaaactcctgaacgtggcattcaagcaagctggtttgtcctgccttccacactttgccttccaggagagcactccttcccgctctgccttgcatttatctgcttccacatcttctcttggatcttacatttgcttatcttcagttttttctggtagaactgtatttatccttcaaggctcataatagattttacccccttactcccctgcccaattccaggcagaactgcctccctcctctgccctagtgagggttcattctgcctgcatgactgctatgcactcaaattacagccccctgccaggccctccctgctagaccaagctccttgcggacaagaactatgtcttacttggcttgatatccccaagtgcaagcaagcaccagtgctggagcctccttttcctgcattggcattcttaccctcagtggcccagagctcatcagctccaatgagaaaagtgctacttagcagctgataattaacagacaggacgtgaggtttggctacttcagaggcaaaactggtatttaaacaataaggtttttaaaaatcaagcattaaagtgtcagcttcagaagcagctacttccaaacataatcctgcccagttagagaagacaaatggaataatgagtggaaccaaagatttctctctagccttgagaagagttcaggggaaagaggcctgggtggcgtattggcaggagattggaaaaggggccttcatatttcttttctctggaatggggctggggctgcttggagagcaggtgggaggtgcttccttagaaagggctgtctgtgttctcttccattcccaatttctatagattggactagttttgccaagtgagcaagcaagaaaaattgggaaacagagggtaggcatcaaccctggcatttatcctaaggtgatgcagcacacacttgtattcagcgatagagacttttccgtaatgcctggtaatatctcattgtattttcttttgatgctcctgggggcaggaggggagagctgacatcagagcctcctcccttctagatcacaaccagagcatgaggaattccccagccccttgaggtacccagacactaaccacaatctccatctctgctgaaggcgttgtaagaaacatgcaggccaggaacagtcagtggcttcagagcaggggcagcctgctaaagaggcagaggcttcttgtgagggcggggagcttgagagtgccctgcaccccatcctgggggaggtgagcatctgcttctgggttcagctgcctgcggaagtcagtgggagacaccctttcagggtctgcttcattatgaatgaagcaaaaagcctatcccaggaaatcacagaggctgatgggtataccccagggtacacaggctatatttttccaatccaaagtgagggtctatctgatagtttttcctggagttggggaggggtcctactttcagatccaaaagaaaatctgagatatgtcatttgaatatgaacgcactagactttctgggaaatgttgaagatttacgcctgtctgagtgtctctcactcgttgttacctgtccatttgttacctggcccacggatggaggaggtcggatggggtctcccagggtccccttgctgggcacgcttggcaggcatcctgcttttcctttcaggttgctggaattagtggtggtggtggctcagctcacccagaccatgtgtgatggttatggtggtgacttctcactgactgctgatgtgtacagtacattgaaagcagtcacccaacttcctttatagccggatacaaaacagtgcctgaggtccagggtcggggaggacttgatgagggaataaaaccagccggctcatctaggggctgatatctgtccgtggtgacataagcacacatgatctgcagtcaaggttgacttgagggtgtgcatgggttcagtcccttttatgaagtctaatggtccttccagaagcttcatcatcatttgaactgaataagtgaagatgagtgcaccacaagtgtgtgtgtgcacttcttaatctgtccattcatctgttcactgcaggcttattgagggagaaacatgtaagcaaggtatttcttgtgtactccaagtggtaggagagctatgttcagggaactgggtgaacttggaagaaggagccgcccgtttctccaagtgcagcgccagtcccgagacactctgtgatcatctaaactggggaacagtctgcaatgcacattactgaattaaaagctctgagaagttctacagtgaaagaatctgtttaactttgtttaacctggtgcttctgccatctatatgacccctttttacttagcacttattaacatcctacggaatactatttgagaaatggcaacagccccccttctctgggagaactgttcagtgattcagagcaaaagtcacctgactctgggtcagcacaagttggagaggtttgaaaaaggtgtatgtatgtttgcatgtgtatgtacggtgggttggggggaggggtgtggcagaggaggggccccggcaggtggcttctattgaaatcagctctgtctgcctccctgttggctttgtgcttctggagaagcttttgtcctggcatgaaaacactgaatagcagctgcatctgtcatgcctgggaagcagcaatgtgcagcatggggttgcatgagtagacactcctgctggagggccaggctgccgagagtgcctgggtattggacaagggagaggctggtgattctgaggcagctgcttgctaatcctggaagcagaggggaacaagatttagctcccttatctctctgccttctcctttccgatgggtgcaattgtgttgactcttgagggacagccaggaagaagcaggtgggctggatgctttctcctttctccaccaacccaagggcatctggagggtggaccagggcagaaaggcgattagctctccgttacccagggagctgagacaaaggcattttgggttaaattcaaggaggaattcagaattgtgaactggatttatggaagtttgtggagtttgaaaattcgagagtcctggctggacttgtgcttggaacgttggtcggaggtggatatgaatgatgggtcctgcagatggccgactcctgagaaatgactgggaggctttactggatttttcgcttggaacaaacccaggcttagggaattcccggagcctgttgcaggcctcaacacccttctggtgcagcttcgctgtgaggcagtggttatttctcaggaaactggcaactgggagtaaatgggagtgtggggtgggaatcagctactcttcctgaggattatacacttccagtgtaattaaggcggggtcaggatttcctatctcttatttatttatttatttatttatttatttatttatttatttatttgcttaatcttaaaaggctgcttttcccctcctggtcttcccacagggacaggagttagtctgttcccagaaggagctaggggaggtgtccttcatctcccattccttcttgccctctccctgcctttccctggccacagccacagagacccagagtcactcagatgggggaggagcaaagccagtccctctgatcattgcctctttgttagtggagaaagggcagatgctgctctgcagttatcccgaccaccctgcaggacgtctgggtgggccgggctttggtttgggaatcgggagtattagctgcagctgccaactgggcttgtacttgcagactcccaggctccaggctctctggaggggaccagcagctctgacccccgtgggcttgctgtggtccccagggagcaagcccttgccaagaacctctgagctcaccgaggcgggtatggggtaaggatggagaaggcctggggagcagaagtgtgcagatgactccctccttcccctcagctgggtatgcatcaccgctgctgggaagacgttcaggccacttctagacaaatcggtcatgatggaaattttttcttgcccgtgggtggggctttacttgttcagaagtggcttcagatgtgctctttctaggtcctggcttgagtgctgagcatttacctgcagcccctcggggctagaaggcagggcagtgtctgagccccttccctaccccttggggctagaaggcagggcagtgtctgagccccttccctacccctcattcattctctcccctcacctgtcattccatccgtcagccccgaacagcttggcagccttgcggctccagctggagcttagtaggcatgtagttggaggagggaacggcactgcagccgcgctcttctctctcccacaggtcttcttcttgttgggcctccacttcctgtcagggccctgcttgcagctgtggcacatctggacctagacggggtatcctgttgtcctgcatgatgaggatcccagatttcccctaggtgatgaccacagtcattccagggtgggagcaggacttcccccacccccaggcactccagagacttcctccaggcccccactaagtagtctgttcccaactccatctctcccccatggagaatggtgggaaggaagttctgccagaggttgtttttggtttgtgaggtaatagactttggtttgagaaacatacatctctccctcttctttaagatgtgaagccagaagcaccagactctggtttccttggaaaccagagcagcaaaggtagagaaaaaaggggctggttgtaggcactgaaattggggaggattctctggatcccagcacttttctggggaatccacatggtctgccctgggccctgggttgtagccctcactgtgttaatggactgtgtaaccttggtaaaatgcctgcaactctctgcaccttagtttccgccaagatgcctaaggtggggaacatgttggctccactcagattctgtgccccagagacctgctgggtgtgtgtgggggtttgggggtagggcatggggctcctgctcactgatttagcatttgctgtggctaaactacaaagtggacagtccacatggagacagttgagagctacttgcacccaggtcctttctttgagaatacagtgatgtaacaggagacttcttgcattttgcctatgtgaaaccagctggattttgctgaagctgtaattgtgtctctacattctttgattcctgtctaaaaaaaatggtttccacaaatgctgtgaagaatagactgacagagctggaaagcgttaagtagggatcctttaaacagatccctacattgtacattgatcccttcaaccacagccagagaggggcagggacttacttgctctgatcacacagtcagaacaagaactaacaacagtaaaggtctgggtagcagcctcacatatgctaagattccctgttggctaagtttgtctgttcccaggtcaccctggccttttgcaattctgccctccgcaggcccctgtgttggctgaaaccagccctcttcttccccttgcgctttcctcctgtgacctcccagccacctcttgtttcccctgtggtgttccccacctgttgttacttcctattcctcctcacaactttttattatgaaacatttcagatgtgcagcaaactggaaagaattgtacagtgaacatgattataccaaaccacctagattcaaccattagccttttactatgtttactttatcatgtctctacgtgtttcaatctctctatccattgaccagtccatcttattttggggatgcattttgtagtaaattgcagacatcaatgtactttacccctaaacatctcagcatacataggcattaatttgagttcaatatttgttcatgcatttttttgatgataatatttatattaacagtgaaaaatgcacaactcttaaggtatcacctgataagctttgataaatgcctctatctgtgcaacccaaacctctgtcaactatagaacaaaaagttttattacctaattaattccctcgtgttgtttcccaatcatcccaacacataccccctcgcaagtgatcacagttctgatgttttctcactgtagattagttttgctttttctggaacctcatataaatgggataatcagtatgaactctcccttttgtgtgaatttcatctgcatggtgacatgtatcagtagtttgttatgctgagcagtattccattgtatagatatgataaaatttgcttctccattcccctgttgatggacatttgggctgtgtccagttttgggctatgatgaataaagctcctgttaacattcttgcacaaatcttgttgtggatgtaatgttttcatttctcctgggtaaacaacgaggagtgtgattgcagagttacaggaggctgttacttattgttcctatctgactctctgccctgccctctcattgtactgtgcacccaattattttaggactgttatcacatccagtccctcagttgctccttcagggtttctcttcttccggcaattcaccctagtttattgaactgttgctcttatgttatgctcctcagatcttttatatcctggttgtcctcctctggaagtataatactcttttacagatgtgttgcccagaactgagttctcgctgctcgatgtgatctacatgtggattctaggtatgggagaaatatagagtgtgggtgcatttggatccctgtcttgagctaggtacttgatctgtgagctgaaggaaatattaactttttggcagccacgtcatggcatcagatcagatgagttaatgtttgtaaaaataccacaaatctaaggtcatattaagatatccattcagcttgaagtcagtccgagcctctgatactaatggcatttattatgaactttctacttgccattgtgtcatttagtttttgcctaccacttggtgagaaaggtactattcaaattagcttaataaaaactccttgatttaaaactagggtacttagctttggcactgttgaccttttggaccagataagcctttgtttgttgtgggggattgtcctgtgctttgtaggagttagcagcatccctggcctctacccacttgatgccagttgcaaccatctatctacccatgcccccaagttatgacaacagaaaatgccttcagacattgccaaacgtcccctggggggcaaattaacaccaggttgagaactattcccaaggtgtagagcttagtcaccgagaaaaaatttaaacaatatagctcttcctgaaaggtaatcactgccagctctttagcatatatacttacagattatgctctttctatggacagtcctcatttttcatggttctaatctgtgtgaatttcagttactatggtttggttaaataacatcagtcctcgaagaatttggctcaaatttgagttgccaggatatatgtattacaagtaactgcatgcagtacaaactttgctgttagctcttcagtccacagatcactatgtacataacagatgctcttcatggtcactgactaatcatgtttcttcttgaagagtcttttggtgattggtcactgcctatctgttcacttcacacgcagacaggaaagtgtgtagttgtgttgcctccctgtctcctagtgagaaactcgtgacattttacaaaaatggacaattgatgagggaattggccaagaaagatgaaatttcaaatgaaatgtggtaatgctggtagtgaatttcaagccaaacgtaatggaattatatagactagatagctgactgtgggaatgtcaacactgtcactgttcaagactacatatacagcctgggaaactcagtgaaggtggcatgtcagcataaatgaggaaagtggtttgatgaaaaggatgaagaggtcccagaggaggtgacactgcagaaggaaacttcacattaaaggcaccttgaagatatttcacaacatcgaaagtgcaaaggataaaacgttagaagcagatccaaacttagaaaggagtatgacaatttgcaaaggcatatgaaagatactcattccatattggatgttaaacaacaagaaggcaagtgctgttcaaattactctggataaggtttttacaaagcaataaaacactcattctcagtgactctaatgttttagagtatacacaataaatagttttactgttttctcatttccttatttataatttgacagcaagagagtttttaatgttttgaccgaaatttttaaatgtcgtggaaaaatcataattttcctcattggtgattagggttgctttgcatggtcatttttatggttccgcattactgtgcaaagcaagagctgcctgtatttacaaaaagtgtgggtgaatacacatgcacacatgcacacaccatgctttttctctttttaaaacattttacaaaatgggatcagactatatgtatcaaattacaacttgcttttttcatggaagttttttttgtttgtttgtttgtttgtttttgagacaccatctctctgtcgcccaggctggagcgcagtggcgctatctcagcccactgcaacctccacctctcggagttcaagtgattctcatgcctcagcctcccaagtagctggtaccacaggtgcgtaccaccacacccagctaatttttgtgtttttaatagagatggggtttcgccatgttggctaggctggtctcgaactcctgacctcaagtgacccacccacctcggcctcccagagtgctgggattacaggtgtgagccactgtgcccagccagaagaatgtatttttgaagaacttttgatttcagtatgtcttaatctacctcattctttttttttttttttttttttatgtttttgagacaggtctcactctgtcccccatgctggagttcagtggtgtgatctctgctcagtgaaacccctgcctcccaggctcaagtgatcctcatgtctcagcttcccaagtagctaggactactggcctgtgccaccacacccagctagttttttctgtattttattcgtagagacagggttttgccatgttgcccaggttggtctcaaactcctgggctcaagtgatccatctgcctcggcctctcaaagtgctgggattacaggtgtgcgtcactgtgcctggccccgttgtctattaacagctgtttagtttatttccttctgtcccctaatttgaaataatgctaaagtgaatatttttgatggatactatcataaactccatttaatcgatgagttcaatggagatttagaatgtgaagtaactggctaaggtcaggcagctactaagctttagagctggtgtttgaacttggggcagtgtaatttcagagcccttgcaatcacaatgctttacaccttctcttccttgttcttagaagcagcttttaacaacgacaacaaataataaaaaaaagatcttactgagtcaggtacaattctaagtgcaattatattgttattattcactaaataacaacctgcgagttagataatgttgttatccctgtattacagtgaaggaaaccggaggtataagaaggttaggaaaggtgctcagggcccacagcagtttaatggaggagctgggactgcccccatgcagcctggcttcagaaccttggctctcattcatgttataaagatgtgactagagaaaagtctctttcatcctgtgctgttgaagatgggtttttttgttgttgttgttgttagttttggcgtatattttctcctactgtaatcttttaaaaatctactacctagcacagactgcctctcccattgttttcttagggggtgtcacttggaagtttgataagcttactgcctactatgtctttagtcagcttgttggtaaaatattaatactaggcaaagccagtctggtgtggtggctcatgcctgctgtaatcccagtattttgggaggccgaggtgggtgaatgacttgaggtcaggagtttgagaccagcctggccaatgtggtgaaaccccatctgtactaaaaatataaaaatttgctgagtgtggtggtgggcgcctgtagtcccagctactcaggaggctgaggcacgagaatctcttggacccgggaggtggagatttcagtgagctgagatcgtgccactgcattccagcctgggcgacagaatgagactccatcacacacacacacacacacacacacacacacacacacacacactaataggtttgccactgaagttgttctttgggtttagtcaacaagtagatacttattgaacacctcctaaatgccatgtaccgggtctaggatttgaaatcaaaagatgaacaagacattgtcccagcttccaagaggtacatggtccacagtgaaaagagaaaccgttttataaatcccactggtgagtgctgaagtaggagtttagcaagagtctgtgggcacagagaggcagaggggctgactctgcctggaagtggtcagagaggcttcacagaggaggtgacattgccatggttcttacagacgtgaagtcatgacaaggcctggcttgcctgaggtcaggaagtgcattgtagcttcaatataggggatgtgttgggaggttagggtagcgatgatgtggataggagctagggaagactaagttagggaatttggattttatcatgtcagccagtggagatgtttaaggaggaaaatgtcctgctcagctttgcctttcagcatgtgacccaagatgtactgggatggagtacgtctcccttctagaaaccagttagaaaacacagaagagtaggccaggcatggtggctcatgcctgtaatcctagtactttcggaggccgaggtggacagatcacttgaggtcaggagattgagaccagcctggccaacatgtgaaaccccgtttctaccaaaaaataaaaagttagccaggcgtggtggtgtatgtctgtagtcccagctagtcaggtgcttgaggtgggagaattgcttgaacccaagaggcggagtttgcagtgagctgaaatcatgccactgcactccagcctgggggacagaatgagaccctgtctcaaaaagagaaagcacacaagagaaaaggggctgcaacccagtaagcgatagcaggactggaaaaggaaagatggatttgggagatcttcccagagacaaaattggattgcttctgtgggtgacggagggagagagtctgaggatgagtactcaagatttatatctgggagcctggctagatagtgatgtcattgccgtttactgagatccgggagcaaattcaaaggggccgtgagttcagtttggtgcctgttcagcagcctgtcctagatccaccaaacagcactttattactggccatttataacaactgcaaatattatctaaatgctttgtcatctcactgcctcctcctttgtcatccctaaggtctgggcaggagactgtgttcatatacttcatagaggtccagaccccttgcgtctggcattcctttggtctataattcagtaaactctgctaaaaaggaaacgagactagcttgctgtggcctcttaagcgacccagggtagcttgtgatggttcagattatgatttgttctagagcttttccagaggcagatgttgaggagtttatcctatttgtccccttccctttaaacaaacaaaagtgccggctggacgcagtggctcatgctggtaatcccagcattttgagaggctgaggcaggcggatcacctgaggtcaggagttcgaaactaagcctggccagcatggtgaaaccctgtctctacttaaaaaaaaaaaaattagttgggtgtggtggtgggagcctataatcccagccactcgggaggctgaggtgggagaattgcttgaatctgggaggtggaggttgcagtgagctgagatcacaccattgcactccagcctgggtagcagagtgaaactcggtcacaaaaaaaaaaaaaaaaagaagtcccaaccccccagttttttatatcctcttagtcatcatagtttattaacagttttgtttacatattgcttctttttccctcttggctagactgtgaaccttgaagccctgtgagcttggtctagtgcctggagcattgtgggtaccaggtttcgagagaatgtgtgctgccagaaagcagatctttgccacctcctctcccctcagctcctgaaccactgccagcagtggttctggaatcaacctgtactttccttctgcatcctgggatgtaattctgggtgattgtaagttggtttatggtctagcttagaattgaggcttctcttgagagagagcatgtgtgtaaatgtttagcttgttctagtctgtggagcattctccttcatagaaaagatgggaaatactggagatgaaaattctccattctctgtcattttgtgtgttagagtctctgtccccatcccagggccacttcctccctggttcttcttatggctttggatgtagcttgaagacatgctcctagcattttcacaagctctgcttgttgtgtttagtgagcgcagactactcccttcgggcctgtcctggctcatgggcagttgctcgtgtctttgcacacatcctttactgtctcagctcttcacttctccctgacatttgtggctgcctcctcctggtttcttctttaagcgattattgtgttttagatgatcagaattcactttttagagacttggaccttgtctttcaaaatgcattcccttttgggatctctgcccatcatactccttggtctcaacatctaaatattggttttttttttctttttctttctttctttttttttttttttgagatagggtctcactctgttgcccaggctgaagtgcagtggtacgatcattggctcactgcagccttgacctcctgggctcagtgatcttcctgcctcagcctcctgagtagctggggccacaggctagtgccaccatgccctgctaattttttaaattattcatagagacggggtctccctgtgttgcccaggctggtcttgaactcctccttctcctttttgtatcctcttagtcatcaagccatcctcctgcctcagcctcccaaagtgctgggatttcagtgtgatccactgcgcctgacctgaatattggtttttttgaagtctaggctaaacaactgtttttgtctcagtttttttttttttaatttccctcctttgaactctgaattgacaagcttacttcctcccaatgtggtgttcttgttattattgtttttgctagctgaagtattttttttttttttaaacataatttactaggtttttcttcctggccagaagtaagttcagggtaatagttcccttccttgtatcttcagctgtgtgagaggtaatgtagagtgagaatttatttatcaggtgccctgctcgtagcagaaggcatgacctcgacttctctctcacagtgaccttgtgtttgtgttggtggcttgaactcactcttgtgtctgggccatttctctcactgtgtaggaaagagtggttcctgtcttctccctggccatgtagtctgctgtgtgtcaccataacaatcatctatcttccggttctttttccttctctcctcacccagttgtctccagtcttaggcgtgtggaattgtgtactgggtgggggatgtgtgtgtgtgggccgccctcttgatttgtaggatccttctcttcctccacattctctgtcaactctcctccaccccctgtgagatctgtggactcaggtatacgttgctgtgagtctcattctgctcagctggggtgatgaaggtgagattgcttttgtcgcttcaaagtaaaattttagatttgctttggcagccgcacagggtcgtatgcatgggggctgcttaggccagaggcgcagtgttcctgacctccttccgtcttactttctcttgctagtttgtccatctctgtggattttttaaagtagatactagatacctagatactactaagaacatgatctttctcttcttgccacttggattttagcttaaagccaacttggaacatttagggtgtttccttcctaccactgtctgcctggtctcctagggaaagatgccttgtatcttgttctggtgtacagtctgcccatttaattggtaagtgtttattgtgactcttctctactgggctctggccccaggcctgatgcgaatagggcaggcctgtgaacagagcaaagacgagtcacttaggaggggacgagagaggccagcggtaaactaatattaccagctcagggtttatttgtcaaagcctcctttgctgtgaataaaaggttagatctgaattgggtctgagtcctggctttattacctactagccatgtggccttgggcaaattattaatacttccttgggccttggttgccgcacctgtacgatggagtcagcaatggatcctgttctgtagggctgctaggaagcttaaatatagcaatatttgctatatataaagtgcacctggtacataattgatgcggttgaaatgaaaattcctctttctctttcagtgccatttgctggaagaaacagaagaaatatctctgtccccatctttcagtttcctacccaagactcctgtgtggttgacatcactgctgtgtgcagtgttcatgtccatataagtcagaagtggcttgcagcagtggtttggggctttggggcctctgctcgctccttatcaattcttagggttacatcctctgggaagatgccaggcctggtcaagtgtggcctctgacctagagttatgcaaggcctctcttcctcctgtggccagtgtgaaatttctcatctgtgctctcctgcctctagcaggaaggttggcctacatttggggcacatctctgtcactgtctcaggccaggggttcaaatataagacctgaatcatactgcacctcagaacccaaacccttttacttaattttttttaaaaaatttcattcagatggtaaaggttcaaacaatacatagagatataaaacagaaagaaaaaaaaatacacgcctctctctagtacctattccccagtagtcaacactgctaccttttttttgcaggggaggtaaattcctccagaaaaaaacttaaacatctacaatttcatatatcctctcccctcttccctaaaaaacaaaacaataacaacaaaactatagaaatgggattatgctatatattctgttcagtacttttttgtttttgaaaatttaaaaaatatgcaaaagaagaaaatgtcatccatattactaccacttataattaaccactaattaacttttaggtgtgtttgcttcttgtctttatgaatatactttaaaagctacttaagtaaggtggaagcagttctgtttaaaaaattaggatgttgcccgggcgctgtggcttacgcctgtaatcccagcactttgggaggccgaggcgggcagatcacgaggtcaggagatcgagcccatcctgaataacatggtgaaaccctgtctctactaaaaaatacaaaaaattagccaggcatggtggtgggcgcctgtagtcccagctacttgggaggctgaggcaggagaatgacgtgaacccgggaggcagagcttgcagtgagccaagatcatgccactgcagctccagcctgggcgacagagcaagactccatctcaaaaaaaaaaaaaaaaaaaaaataggatgttaaagataaagccaaagtattatatcatcttggtccttatctgctttcccatttaatagcatcctgctctccccgtcgccgtggatggggagctgcctctttcttctacgacaccgcacgttttccattgtatggatttgctgtcatttcatttatctgaccaccctcttattggtaggcatttaggttattaccagtttttttgccattaaaatgctttatgaatataatgtgtaggatggtttcttgctgggtaattactgggtccaaggtttgaacatttacaattttgatagacatggccaaatacctccccaaaaatactagtttatttctctaccaactgaatgtgtaagagagtgccttttctccccagatctttgcataaacctgggagttttattttggtcaaacattaaaattttttttttgccagtctggtgaaattatcatcttttttataaacatttctctttgagctacactgagtgtcttccattcagccatctgtgtttctcttgctttgaactgcctgttcttatcgtttggccatttttatattaggttgttgatcttcaacaattgatttgcctgagttaagttagccttttatccatcatgtgttggaaatattttaaagatttgtcatctacagtgcgatttttaggcctcttgactttttgttgagccctaggcttttgtgactgcctgtgacagctctggagagggggccgacaggcacagtggcccgcagtcgagccaggccccatcttctgggcagtgacgcgtggttgttttaaggcttttggtactgggattccccgttgtaagttttagctttgttttgggtagggacttttccccatcatattaatgaacattaataacaaatagagacttgcttttgcctcccaaccaaatgtttgggaatgtgtgcacccacgtgaagggtctgtgtgatatctttatctcatcaaccttctaaggcttttaaaacctgttgttagatttatgtttagatcatggttctaggggagaaccatcgtcactcctcattgagctttgcagaggctctgaaaggaggacatactctcttccccaatcaatgtagaggaacgtcagtagttcagccaagattgctctatctgccacctcttatgcttccaagctgggctaattgagaagtgtgacatcttgctccagcctataagcagctgtctgtaattttgagagatgagaaggattctcccttaaaccattgctgcttttgtggcagcatcttatttctttcctttgcagcacaaatcacagtgtataattaaaactattttctttgagcttgtttttggtgtacctcctgcactaaaatgttaagttctgtggcggtcacggggcttatttgtcatgttctctattatacccttggcatcctctaaaccagtgtgtggcacatgctaggcactccggggtttcactgagtgatccattctgttaggatgggatcaagtgctcatgtgtctcctcctgtgtccctctctggctccagatcttccacctggcagagtttccggaagccccagagatatgctccatggccatagggcctgagacgtggatggctgccctctgactaaaatttagagagctaagcttgtctctttaaaaagtaacatatactaattgtaaatcacctagaaaatacagacataataaaggaaattaaatctgtgattctgtctttcagagatcattaccattaacaactcattgagtcttaatgcctttattgtttttgttttgttttgttttgttttgtttttgagacagagtctcactctgttgcccaggctggagtgcaggctcactacaacctccgcttcctgggttcaagtgattttcccacctcagcctcccaagtagctgggattgcttacaggtgcgtgccaccatgcctggctaatttttttgtattttttgatagagacaggctttcagcatgttggccaggctggtcatgaacttctgacttcaagtaatctgccccccttggcctcccaaagtgctggggttatagatgtgagccactatggccagcccctatgcctttattttttttatatacagatccaataaatatccatagagcactgagtttatgctgtacataagggtttgtaactttcagttaccatcagacatgttttgataatgaaatttaaagaaagtacacattgggatttgggatgcagaagaaaaaataggatagtattctagacaatgacagtgatgatacctgagaatctagtagacactcaggaatccacatttccccatttaatattcatctgaaacaccatttcagtggctgtagattgtgtagctaaactcacttttacataaaacaacctctgttacttatctctgggccttaagtttgtgatatagtttggatgtttgtttctcccaaatctcatgttgaagtgtaatccccagtgtgggaggtggggcctggtgggaggtgtttgggccatgggggtaggtccctcgtgaatggcttggtgctgttcttaagatagtgagttcttaggagatctggttgtttaaaagtgggtggcaccccacccctgttgctcctgctcttgccatgtgacatccctgctcccccttcaccttccaccatgattgtaagcttcctgaggcctcaccaaaagcagatactagtgccaagcttgtaccagctgcagaactataagccagttatatcttttctttacagattacccagtctcaggtatttcttaatagcaatgcaaagtagactaataagtttgttagctatttctagtaaaggtaaataactcttgagatgtatattttcttaaagatacgtctatgattaatacctgaggatgaaattctaaaagtagaattttaacatcaaagggtttgcactttaaggcattttcagcctccatttctggctgttgctgttgtggacagtcttgggcagattttgaactctttgccttactgtggggtggtggaaaggaggctttaggagcagccagagcagggttcaaactccagccctgccagggacaactggccaaaaggtcgtgaactaatgactcagtgagttttctcatttataaaataggatgtttcctcccagggtgggggtgaagtgggtgagatgacccatttgaagcacagtggacccttgaacaatgcaaaggttgggcagtcaattcacataaaacttttgatctgagttgggcagatcacctgagattaggagtttgagaccagcgtgaccaacatggagaaaccctgtctctactaaaaatacaaaattagccgggcatggtggcacacgcctgtaatcccagctactcgggaggcagaggcaggagaatcacttgaacccgggaggtggaggttgcggtgagccgagatcgcaccattgcactccagcctgggtaatgagagtgaaactctatttcaaaaaaaaaaaaaggccaggcacggtggctcatgcctgtaatcccagcactttgggaggccgaggcgggcggatcacgaggtcaggagatcgagaccatcctggctaacacggtgaaaccccgtccctactaaaaatagaaaaaattagccaggcgtggtggtgggcacctatggtcccagctactcgggaagctgaggcaggagaatggcgtgaacccgggaagcggagcttgcagtgagcggagatcgtgccactgcactccagcctgggcaacagggcgagactctgtctcaaaaacaaaaacaaaaacaaaaaaaaacaaagaaacaaaagaaaacttttgattcccctagaactactattaaataatagcctactgttgacccgaagccttactgattacatagttgattaacacatattttgtctgttgcgtgtattatatctttattcttgaataaaataagctaaagaaaataagcatcgttaagaaaatcactttgagtaggctgaggaagaggaggaggaagaggaagggttggtcttgctgctgcagggctggcagaagtggaagaaaatccctgtataaatggatccacgcagttcaaacctgggttgttcaagggccaacagtacttagcagccatttagcacagagcactgccagcccccctcggcctgcagcctgctccagcaccttgctaagaggttgctgaggctcacctgcagcagctgccctcccgagtcctctttcctttacacccctcagagcacccgggccagccatcctccatgtggtgcagcagaggcgccggtggtccgggaaccagagtgggtggccctggcctggaggcacggtgggttagtgtgtgacacacgtggctttcccccgacccccagctgcctcctgggagtgaagaggaggtcttatttgccaacacataccgcaccacacacccacaacacacttggtgccagaatcagccttttgcatcgctcttggcgctgaatcagagtctgtcttggggagggatgtcttccttctctcattacatgcgcccagcttaggtggtgtagtgagggagtgtacagggctgggatgccacagcctgctttcctccccgtgtcctggggtcccccgtctgtccagtgcccagagctattaataacaccttcattgaaatgggtgtaatggaatcccagttgccccccccagtgggactccaacacatggggagtggggagcagaataataatagcaaacacggatgcagtacttattacgtgccaagcgttattcttagttatttacatcatgcacatctattaactcatcttgtatagcaagcccatgaggtggggactattactgtcctattaatgggtaagggaaccaaggcacaaaggggttggaaacttttcccagttcacatagctagtgagcagtggcgcttgtgaagggggtcctcctgagggcctggggcctgctccttcccagtcttgtcttcatgtccaccttgctgacgagtggcacatcaggccctgggtgccggctgctttcctgtcctctggctcagccaggcttctaatgctgaccactcctgagtctttccacgtggctccacaatggcagacttgcaggaggagatgaggggaaccatgcataccttgaatagggggaggggtcctgtccttcttcccctcaggtgctggaagagacagagaggcatgggactgtatttaggcagctcccgcagctccctcactgccgctgtcctagagcttccttcccaggcaatgcgctctgtggcttgggcccctgcccctgccacagttggcagggggccttgcctgtggcgttgcagctgagcacacgcaatcattaaccttttctacgtgtaagagaatttcaggcacaaactgtggggctgaggtgagtcacaatgttggaccggggcttagtttgggcttaaaatatttcacaattcctccaggcattctttgactaatgatctatggctttttagtgggaagacccttccttcttctagtctccagtcctcagagcatggttcagggcctgttggccttcactgcccatggccatgcccatgcccaaggagcaggggccttggcttctgggtggacctgccgcctcgctctgctggtggcctctggcagtgccctaggagtcctgctttccttccctgtctcttctttggcttggagtgcaggccacctcccctgctgttctttacttagccctgtactccagattagcacattcttggtttcctctctccaggccttctgcgctccacacttgtccacagagccactttggcacttcagggctgtgcccccaggacgtcagccagcctgcctcgcccatctgaagggctttcattgcttgggttgattttcttatccagtcagggatttctgataaacatgtgcctggatggatgtcaatgaccagtcctttttttttttttttttgttaaatttaatttaagttctggaatacaaatgcaggatgtgcaatgaccagtcttcatgggaaattcttgctaagtttctctaagaaatttaaaatactaccttttccaatttatttcaggatggaaaggacagctcaccctcagtcactgggggagagagtttagtagggagaagaagcaacagaatgagggggtgttagctcagaagttcctaaccactaggtgagggaaggaagaggggagggagtaaacagaaatcaaattagatcttgcccattagaaactcagttaggttgggcagataaggcataaatatgcaaaatggtaaattttttcaaagtggaaactaccctatatagagtttctgaagcaccttcaaggatattatttcacgaagttgaatctaattttacagatgaggaaaccctttccagaaagataggtgggcttgcatgacacaagctaggaagtgcagaactgggattcaaaatgcatgcgattgcaaagcctaggttcactgtgctacatccgtctcctctaatgggtagagagtttgtgcaagtctggaagtgtgatgtgaacctagcccttcttgcacaaactctcctttgccttgtgccacgcactcctaacgtgttcagggcagaaagtgcggaagttgcagtgagcgcttggaattcagggggtgctaaggagcatgcatttagatttggatcttggtgcatcctcacttagcacagctctggttggcagatgtcctggtggtcgtcactgggctgaagacagaaacccagcctacaatcttggtgataacttgtgctggttacatccacatgctccaagctcaactcagtggtgacggaggaacccccctgtactgtggcattaatggtactggttgacagtgatgaatgcctttctgataataaagcacttttagaggtattatttcattagatgctcataatgtttctatgagggggaggctaggcaggtatcatcgctcctaaatgcatgtggcacaggctctgaaaggtagacctctctgtgaggctgtgcaagaagaaattgacaaatttcagactgggccaagtcttccctgattgtaactctacaaccaggcattgcttctgagtaaatctgacaactttgattcttctcctctgggctccagttcctgtgtgcctgtagggggcgatcgaggttctttctgcttggctgctctggaaaccttgttcctcctgaaccctttgaatttagcactcttacagcatgtaatctcactggattttaaggattttctgtgtctcccctcatatcttcttctgccccccactagcctaggcttttccagatcaggactgctctatttggttttgacattcagtgcaatgcatggcccatagtaggagctcagtaaatgcttgctggattgaattatatacaaaggaaattggccagtgccttctcttgctccccttagagcatgggaaagtaaacttttttcctggtacatccaaatgaatgaagttgaaggctgggcatggtggctcacacctgtaatcccagcacattgggaggccaaggtggggtatcacttgagaccaggagttcgagaccagcctggccaacatggcgaaacccggtctctactaaaaataccaaaaaattagccagacgtggtggctcacacctgtaatcccagctactcaggaggctgaagtgggagaattgtttgaacccgggaggcggaggttacagtgagccaagattgtgccactgcactccagcctgggcaacagagcgagaccctgtctcagaaacaaacaaaccctaatgaagttgaaagtggcagaactcaagacccatgaggtgtcctcatatggccacaaggtggcagtgtgacctcctgggaaccttgcctcctgcaactattggctccggccacctgttactccatgggagagaccgagttatctagtcattgattccttctagtcacctgtttggggaattgcctctgcaaagtcagtctgagaaatcttggcttccagcctcctctaaaagctgggtggtgtggtggaaagacttggtctttggagtctaccaggcctggattccaaccttggctctgccttttctcagaaacttagccttgggcatgctacttctctgagcctcagcttccccatcctgtaaaatggcaaatgtacagttaggaaaaacccaacatatcatgggccatagcataaatgtatgccagcattcttgttggaaatgctcatttgtccttcccttccctctgcaagctggctccatcatggccatctgatcttatttgcaagcttcagacactttccagcaggttcttaggcctccctgctgtatcaccccagctccactccatctcggtcagtcagcacctgcttcccacgtttccctctgccttcatgccttccctctgcctgtccatttccttcccagcatgtctcttggacaccccagccctctgaatgtccaaagcagttggagtgtggactgtgtagggctcatcttgacttcccatgaagatgctaaatctgtgagtgtccttgtcttaattattttggcacctgcgcttgcacttagacaattggtgataaaaatgacagctattagtgagtgcatgtcagatactctgtgaggtgctttgtggaaatatttcatttaatcctcacaacaaatctgtgaaacagaagccattatccatccccactttacaaaggaagggtagatcaggatgcttttggctccaagcaatagacaatttcatgaaaagcagcttaaacagtaagaagagtttattatcttgtcaaaaagaagtactgagggatccctggtgatggcagcgaggatccaggtgattgccatttctcctggttgccttcctcagtgcattggtttatcctcttaggccccccttactggtaataatgtgactgtcatggtcccaggtgccatatgcaggagagatgatgtacatttcttgtgctccctttaagaagcctcttagcagatttcttttttttttgagatggagtctcgctctgttgcccaggctggagtgcagtggcgtgatctcggctcgctgcaagctccacctctcagggttcacgccattctcctgcctcagcctcctgagtagctggggctacagtcgcctgccaccatgcctggctaattttttttgtattgttagtagggacggggtttcaccgtgttagccaggatggtcttgatctcctgacctcgtgatctgcctgcctcggcctcccaaagtgctgggattacaggcacgagccaccgtgcccggcagcagatttcttacaaggctcttggccagttgagttgtaggcttgttcccaagccagtcactagcaaagggactggaattaatgagactggcttagacaggtcaagattgaacccctgaggctggtgagaagccagcctcctttaatacccctagccaattggtccagggagaagaaggggcatcagtgaggttcgacgagttaagtaacttgctcaagcttggaaatctagtaataactggattcatactggcatccggctgacttccaaggccatctgttgccaggttgaagtcaactacagaggtagagagaatattgctctggatttgttgtgctgggtctgagtaattgctgaggggccttttcctatggactctggagtctctcttctctctagccccctttccaatactgtattggtttttctcagtctgcctttctccccgaagccccttcaccccctgcttcccagtacctgagtgctgcctgccttccacagtagactttatggcctaagctggagacaggtctaagctggaccgaatggcctgagggctgatctcagtgtagctgtcaaggccccaagagagtcatcatgagatttcatatagagcagataaggaactgcagaggcctcaggaaatgtgccaagggggctggtggggggggccagcaggagtggggggtttgtggtatgtcggtggcgatgtcagggcatgtgggccaggggcttagagcaggcccatgtgacagcgcagttactcagaaagctgtttggcctgcagatgcttcaggactgccccaaggcccgcagggaggtggagctgcactggcgggcctcccagtgcccgcacatcgtacggatcgtggatgtgtacgagaatctgtacgcagggaggaagtgcctgctgattgtcatggaatggtaagcagccactgttctagtcccggcccagcctgttcccactcctcactcaggcaccttaccctctgaggacagcccagggatgggcctgaagcctggaatgtaaacacttgattttttggggggcagtggagagtggcggcgggctgttgtgttctctggatctcactgtggcttcatttcagtttggacggtggagaactctttagccgaatccaggatcgaggagaccaggcattcacagaaagaggtagaaagggtctgttgtgggagcacgtgcaggcaggcagggcagtgggggtctgaagggggcctttgcagtgcctgctcttggggaagggtgctgaggctgctgccccctccagcatgctgcaaggggtgcctcagctgaccagggaagctcctggtggctttgtttctggggtgggtggtggctgtggggagcctcaggctgcacagaggtgggacccggtgcactgggttttcaagcctaatgatgtgtctttgtgactttctttcccactcactcttccctcccctctacagaagcatccgaaatcatgaagagcatcggtgaggccatccagtatctgcattcaatcaacattgcccatcgggatgtcaaggtgccagctgttcataaccctgagcccgagtgctgtggggggcaacaaaggggctgtggccaccccagagatggttgccaggccaccctgcgtccttgctgcctggttcctgagcatgccattctctgccttgtagggccttgccctctctgcccatgggcaaacccctaaacccagtagtgaagcattctctggccccactcagccctgtggttctcctcaggcagaacccctcagtcacactcttggtttctctgttcctgtggtgtttactgcgggttctgtgtgtcagtctgttatctccaggcactctggaaaccctgcagaggcaggcacctgcccatagagagctgccactcctcgtggtgggcagtgcccaggataggcaaatggttgctggatgagtagaggaagggaggaaccaggatccttttcgtttctgatagcccctcccaggtccagcagggttgctatttttctgtctctctttctgtagcctgagaatctcttatacacctccaaaaggcccaacgccatcctgaaactcactgactttggctttgccaaggaaaccaccagccacaactctttgaccactccttgttatacaccgtactatgtgggtaagtccacagggggcccagggacctaggcttttcccagaacttttctcagcccctcctcttggctatctggggggccgcaaatcctaggagagttgtgtctgtatggccccttctggtgctggttctgctgggacctgctgagaagtagggcttgtcagagcgaagctacagttgagaaattgtaggaaaggatctgctgggatctttctgagaagagccatggtttccatcagattctccatggagtctggacccaggtcttgttctggagccacagctgattggcatggaagaagctttcaaagcatgttcagagcatctgtgaaattaaatgaacggcatgggcctgaaagtctcatgcagttcaggatttttagaatcttaagctcctagttccaggttcctcatggaggaggatgttctgttccagtccctgggctgggctttggctcttccttctgtgccccaactgctgccacctcatgataggctgaaaggttgggatggggagcatctttcacagagaaactgagtggatcacagggttctgagggccggcccacccatgttgacctttgatttgcagctccagaagtgctgggtccagagaagtatgacaagtcctgtgacatgtggtccctgggtgtcatcatgtacatcctgtgagtgtgctggggagggggctgggtggggcagggagtcagggcggcctgtacttctccaggacaagaggaagaggcagacgttagcattcccctttgtacaggggagtcccctgcgtgccccttctctcagttccgatagctaagtggcgggtgtaaaccagctcatgggctggaaagtgtgcgccttagatacttgctatgctggattcccgggccccgggcttgactttgtatattgtgcctgtgtcaataagccctgatttctctgtgacctttacaaggagaagagcctgtttctcatcctgttcctggtacagggccactaagtgacagctgttctgtctcccacttccttcctcctgttgatgcaggctgtgtgggtatccccccttctactccaaccacggccttgccatctctccgggcatgaagactcgcatccgaatgggccagtatgaatttcccaacccagaatggtcagaagtatcagaggaaggtaagaacccaggctttcaggacaaggggaagagcccgtgtgtgtgtgtgtgtgtgtatgtgtgtacacgcagacacatgtatgggcctccatctcatgtgcgtggtgtaactgtgggttagcacctatgcccacgcctgcggggtgcgtcctgcttcattttgcctgtgtggagggctggaggcagggccaaggctgtggggctgtgcagggcctctcaagtggtacagccgtaatggtccttggggccagttgctccggcagcctgcctccatgcaccccctctttgaacctggtttccccatgaaaactggggaaaggagcaggccagggagagtgacccctgagctgtcactgccccctgtcccaccccacagtgaagatgctcattcggaatctgctgaaaacagagcccacccagagaatgaccatcaccgagtttatgaaccacccttggatcatggtaagctcggcaggctggggagccttgggtctcacgggactattccacaggacagagtcttagccaggaccctaccccaggctttcactcggaccccttttctctcttctcagcaatcaacaaaggtccctcaaaccccactgcacaccagccgggtcctgaaggaggacaaggagcggtgggaggatgtcaaggtgaggggcaccactgggtgagaggggctccaggtggggtgggcggcttgcggggagtgcccaggtgtgaggcgtggtgctggtaggggagagcttgattctgcctctctcatcccaggggtgtcttcatgacaagaacagcgaccaggccacttggctgaccaggttgtgagcagaggattctgtgttcctgtccaaactcagtgctgtttcttagaatccttttattccctgggtctctaatgggaccttaaagaccatctggtatcatcttctcattttgcagaagagaaactgaggcccagaggcggagggcagtctgctcaaggtcacgcagctggtgactggttggggcagaccggacccaggtttcctgactcctggcccaagtctcttcctcctatcctgcgggatcactggggggctctcagggaacagcagcagtgccatagccaggctctctgctgcccagcgctggggtgaggctgccgttgtcagcgtggaccactaaccagcccgtcttctctctctgctcccacccctgccgccctcaccctgcccttgttgtctctgtctctcacgtctctcttctgctgtctctcctacctgtcttctggctctctctgtacccttcctggtgctgccgtgcccccaggaggagatgaccagtgccttggccacaatgcgcgttgactacgagcagatcaagataaaaaagattgaagatgcatccaaccctctgctgctgaagaggcggaagaaagctcgggccctggaggctgcggctctggcccactgagccaccgcgccctcctgcccacgggaggacaagcaataactctctacaggaatatattttttaaacgaagagacagaactgtccacatctgcctcctctcctcctcagctgcatggagcctggaactgcatcagtgactgaattctgccttggttctggccaccccagagtgggagaggctgggaggttgggaggctgtggagagaagtgagcaaggtgctcttgaacctgtgctcattttgcaattttatcagtaatttgacttagagtttttacgaaacctcttttgttgtccttgccccactcctctccaccagacgccttcctctctggatactgcaaaggcttgtggtttgttagagggtatttgtggaaactgtcatagggattgtccctgtgttgtcccatctgccctccctgtttctccacaacagcctggggttgtccccgctggctcacgcgttctgggagctcaaggccaccttggaggaggatgccacgcacttcctctctcggagccctcagacatctccagtgtgccagacaaataggagtgagtgtatgtgtgtgtgtgtgtgtgtgtgtgtgcacacgtgtgtatgagtgcgcagatctgtgcctgggatcgtgcatttgaggggccaggggcaggcagggctgcagagggagacggccctgctggggcttaggaaccttctcccttcttgggtctgccctgcccatactgagcctgccaaagtgcctgggaagcccacccagattctgaaacaggccctctgtggcctgtctctattagctgggttccgggaggcagagaggagtgaccgggcactggcactgcgatcaggaagactggacccccagcccccagggcccccctccccccacttagtgctggtcctaggtcctctgaggcactcatctactgaatgacctctctacttccccttcttgccattattaacccatttttgtttattttccttaaatttttagccatttctccatgggccaccgcccagctcatgtaggtgagcctgggcagcttctgttggcagagcttttgcatttcctgtgtttgtcctgggttctggggcatcagccagctaccccttgtgggcaaaggcagggccacttttgaagtcttccctcagatttccattgtgtggcctggtgggtcagggggagtctttgcaccaaagatgtcctgactttgcccccttgcccatcagccatttgccatcaccccaaacaactcagcttcggggccggtgaggggaggggcctcccccagcacagatgaggagcagctggggtaggctgtctgtgccatggccccccactcccccttcccttggagggagaggtggcaggaatacttcacctttcctctccctcaggggcaggtggtggaggggcgcccagggtcgtctttgtgtatgggggaaggcgctgggtgcctgcagcgcctcccttgtctcagatggtgtgtccagcactcgattgttgtaaactgttgttttgtatgagcgaaattgtctttactaaacagatttaatagttgagagtttttctttctctttcttcctggggctcaggccttaccccccaccgcctctatgtgcagaggggttttgttgggtggtgagggtgtgggttgggggtcctgggagaggagcggagggcctcctgggcgagcaggagccagcacctcattggtgaggacctgggcaggatgtgtgtagggcatccttaaagcaggacagggaggctgcaagggctcaagcccatcttcttttgccaaatgcagaatcaggagccaagctctttttggcatatgattctttgacctacatagccaccaccaggtgctggcacctttagcctgcgaaagccagctggtatagggtccagggaagagggggtgctggtgaatttggttgaaatcctggtaaagataccaggggagcaggttagtgtagtaccggcactctccaggaggcggtgataggggtcaggcagaaaccaaaggctctacctcggagctagaagagacttcatggttcctgtggcccattctcagtgcacagatgagaagactgaagcccagagctggggccacatgatgacttgacccgcagcagagcctaaagtagaaactgggctacctgccccattgcagtccctccgggtcagatgggaaaatagcacatccttcactgtgtcacccgcattttcttatgtgaccctcagagctgccagcaagagacagtacagggcggctgctgattgctgttttatgtgtgaggaaagtgactgagaaggtgggatgatgtgccacagttgcatggtgggattggaactcagatccctctccccgctggaggagagacctgcttgtcccctttgctgccagaaggaccatgtctccaccctcagctcctgggaacagcaggccctggacctccccttcatgacagtgggttgctgaggttggttctcgccttgagacactactcatcactctaaaatcacagctcaaaacaaaccagcatgggggtttgctttcagagaaatccacttattttgtctgcacttatgaaggtgttagaagcaataacccaagaaggaggaataaggggtgctaggagggagtcagggagagaaggagaggaagttgtcagagttctgctatctttagaagctgttattagtttcctgttaacaaagcttctgccatattaattttatggcttaaaacaacacaaatttatgatattcctgttctgtaggtcaggagtgtgatagggtctcactaggctggctggagtccaggtctcagcagggctgcattcctctttggagggtgtttccttgcctttatcaattctaggggcttcctgcattccttgggtcatgaccccctttctccatcttcaaccgcaaccttgcatttttctgatccttctgtggtcacttctctgacccagctggtgtgataagattgagcccactcagataatccaggataatctcctcattgcagggcccttaaccgtaatcccatctgcaaagtcccctttgccatgtaagggaacatagccacagtctggggaccaagacatgggcatcactgggggccaggattctgccacagaggcccgttgcacagccttcttggcctcatgcccaacgttggcccttgtgttttgcttccttccctgactcagcccatttcaggaggatgcttttgtggtcagcaaggattcaggctggggttggctttcagggaaaatggctggggcgaagggccaggaggggtctggcatggttagtggggtcttgccacagcttttcacccccatgcccatgtccctgaccttccatgctggcatggccctgcgagtccctgtctctagggagagcttaacacctctgctaaatgcctgggtgggatggcaatggaaacttttgtccctaaaggcagatgctggcttgcatgggttcaggagcaggtgtgcttcttgaacacccttaagtagtgtgagatgtaaagaggagcatagagacactcctgggcccctaccaagtaccgatgctgggctcttcccctccatctcttcattatcagaaccctctgaggtagtcagtctcgtttccagcttacctgtaagaaactccaactcagaggagtaaagggactcgcccagcatcacacagctagtcagggattctgacctggatctcctgtttccaagtttagagcttctttaagaaagcccatggacatcgtcttggtaagggagtgcagagggggcggggaggagaggagatatgaggctggattccactccactgaggaaggtctagttttctttgctatagaatgagggtgatagtcctaggcctgtggctgttttaaggattcagtgagatggtggatttatttatttatctgagacagagtcttactccatcacccatgctggagtgcagttgtgtgatcttggctcactgcaacctccgcctcccaggttcaaggaattcccctgcctcggcctcctgagtagctggaattacaggcacataccaccatgcccagctaatttttgtatttttagaagagatgaggttttaccatgttggccaggctggtctcgaactcctgatctccagtgatccggccacctcagcctcccaaaaagtgctgggcttacaggcatgagccactgtgcccagcctagatggtggatttaaatgcttcctaaaatgccagctgccaggtggcctttatcaccaggagggtcccacccctcagtgcgctgctcagcagtgggagcacagggagccccaggcttggagtcgagtcagtggcctaggcctggtccacgctcctgccctgagcttcacggcgggtctctgtgccttggggtgagcaggcagttgggttggtaaacaataacagtaaatttggggttttcctttgactgggttggagacaggaaatgcaggaggctgtgagtgacgagtgggtagagtgggtagcaggtaggtcgggtaggtcgggcctgctcagggtgtgaaggaaattcagttattcaagggaggagggtgagggtggtgaggctggggaaagtggctggcccacttactggtgaatataaacaaaccctctgggcactccccaggtggggcagagtggggacaggggaggctttgaggggcagccaccgcatcctcagccctgagaatgcagctcctttcgggctctgtctctggaagcctacatttaggggctccagccgcccctgggtccttttgctcacttcatcttcctgtcgtctccctgcactcagtcagaacagtgtggctccccagcatactcgaccactagataatccaggcacttggtgtatgtcctgtgctttgggagaaacaaatgaagtgtagggcacagttcctgcccttgagaacctagttggggagatacaaaatgcctgtgtgcagcagcaagtggctttgtcttccctttccctgtacccacaggcctggacacattaggggctgttccagactgagaacaatgtgtcattcaagcccaggtggcatagggcagcctcttagggccccagaggttttcagatgagcatgagtgaggtgaaaaaaccaaaatgacaaaataaaccacaccctggatcctcgtcctctggacgaagatctcacatctatgccttgttggggaggatttcagtcctcccccacccaggcatgtgaagattaaatgaggctgtgccaagacttggaaaggtgggggaagtgcaactcgtgtggaaagataggactgccccctgggctctgggccaccattcagacaggtcagtgccttggccttttcagcctaggctgctctttaaaaagaagaccttcagccactatccaagagtaaaaatgtcacattttcaacattcagctcatcttgagcacctcctctgtgtcatgcccagtgcttaggacttcggagacacacagatgagtccagaagtgggtctagcctttgtggagctcagcatagagaagtggcgggcatcgctgtaacagaagaactgatgctctccagaacaggagcagaggtggttggagtgcataaggtggagctattctgttagagacccaggagagcttcctagcagcccttcaagctggcacctgactgacagttttgatggcagaaaatggaatagcatgatggagatttccccattgcatttctgctctcacttctctctgcaagagctagatccttccttctccaacaggttcacccctcctgtcttgtggtctgaactgctgtctgtctgctcatctcgttagcttgacctttgacccctcatgggttctgctcatggaaatctgatttactcctctctgtggggtgcccttggtgttttctgtccattttccctttccagcccctccaacttggatttgcctcataaatgatgtttgctccctgaaaaacaaaatttggggatgtgggctgatggggcttttgccacgtttcactcaattcattaattttttaaaaagtgttacagtggtacaccttaaacttagatcttttgtagttaggcactttctgaatcatcatggaaaatgatgacattacatgaaattgagagccctcctggaagagcaggatgagcaattgttaggggcttccttgcccctcttccctctgccactaaaaggcctttctcatccctttgtcctcatggttcttactccactcagtttaaaagtggagcccttgggagcctccctggcactcacacacaaaaatgtcaatatacttggcgtccaccctttccatttttaacacaccaccatctggaacccagaattaccttggaatttacttgtctcctctagagggagtcataattgcttggaaggtaagttactgcccagagcctctggccaggaagtcttttggctgtcaagcctgcaggatttcaggtggggctgccaaggtggtggaacctgtgtttgataagtcatttttagggaccagggctgccatgcaaatgcatttgtttgcataactttcttgctctcagggacagtaaagtttcctactgccatcccacacccctgccaggatttgcaagtgaaataccaggactgactttccactttcccccttcatgagtcctcccttcctaagtcctcccccaccccttggttttggttttgtctctgaggtcctgtgtgaccaaatactagtctcaacctctctgatcctagggtagtagtgtttccaggaccctgatatgcaaagtatctgtacaagttatgcaaatgagcatcctgtctgggtggctctggtcctagccccgggcagttactagctctgactactgctgtccgagtgtgtgaaacgtgatcttgctccttcctctgtccaggcagctgtgggtctcttgttcctcaaacagctactgcctcttggggtaataaggcctcaagtttcagaatgagctgagttctcctagcccttaccttctgatctggagacatgtggttctgaattcaccagtcaaaggtttacttttgaaagaaaccacgatctcatctaagtctaagacagagaccttggttagctggagtctgtggtgcagagagacctggtatttgtagtaagacctagaggggcctttggttttctggcactcagctgtctccttttctggtcacaaacctattctaaggaaatggtcctcatagtgagactctagccctacccacccacaggagggtcgagggcaggaggggaaggatgacagccaggcattctttgagccagtgtgcaaggaagagaaagggtagacgagaaattcagtctgatcggcttatttcaggctctgaaaatgacagctgactcagggtaggtgcttagtatctgttggatggatgaaagcatctaaaggaaaattaacacaagtaattttagtaactcaaacaagacattatatgtacatatatagacatacagagtgaggcgtgaacctttctctttataacgtctccacctcagtgatgccaattccctctccagaaaaaacttcattgaacagctttattttttttgaaatttttatccaaaaagtttctgaaaatttatctagatacaaatatacttataagcacaactgagaagtttctttggcagttataacaagtacaaatggaatcattaggcatattgttctgcaacctgcttttaaaaaattgtgataaaatacacttaactgaaaatttaccatcttaaacatttttaactgtaaacttcactagtatgttcacattgttgtgcaactgacagactttttcatacccatgaaacaacatacagcttgcttttttcacttagcatatcttgtgaatttccatgatcaaactcatagaactatcattctttttctaaatagttgcagagtattttatagtatgatgtaccacaatttatctgctgtggatggatatttctcacctcctttcttttttatttgtcttttaacctcatttgcactgaaggactaccctccccccctttttctactatttatatagatctcacaaatatcttgtacagtatcttcgagtgtgtgtgtaaggatttctgtagtatagatccctagtagtggaatggcaagatctaagggtatacacattttagtttttgatagggactgccaaaaagacagtatcgatttatgaatgaatgcactttgcatattgctttccaagtgagagctttacgaaagggtttgctgtcagcagcaaatctgggggtagagtcagtcagccgagagtaaaagggcatttatagcacttcccaaaactgatagatgtagacccttggccacattgtgggcgagtggaaaagtcagctgtagaggggtttaggggattccttcaacatctccccatatcagtggccctgctcactcaattatggttatttgcatacattttgggcatgtaggcagaatggctcaaagacaaaaatctgaggttcagccttgtttggcctcctggtgtttgatcttgaccgggctacctgcttctctgactggcatgcaaatgcctgtgggggatgacaagtgtgcacataacataagtgacataaggctgactctggtgggtgctgtaagagaggcccagagtgctgtgggaagttacagaggaggcacgcctctggttaggaatagcagggaggaggaggcggctttgactccgggttgtaggtgttgtggggcacacaggacacatgcaggacccactatacaggagctcactagacaggagctcagccacattgcctcccaatgtgacactgattgtgtgcccagccctctgctgggtaccgaatctgaggcatcagtcttggggatggcttgggatgtggtggtcagtagctcagttgcatatggcacaaagataaatctttggagttactctaagctgggtcccaactatgagcagatgacttgtcctctctgagcctcagcttgtcaaccggtaaaatgggaattattattgaggcacccatgaacatgtgccccagagacctcctattatggggagcttatttgtccaagggccccagctatggcactctgaaattcattgtctcatttgtgtggaggccacacttcctttctcgtgctcccagtcaatgacagtacaacagggatgtgaagacgcacccgttcctgggagaaccaggactcgaaggatggccagctttgcccctggcaacttcatagacacttgtgcctggggcccttgtgcacatcctcctctccctctttccttagtggggtcacacaccggtggttccccagcctcgcttcacactccctattttctctcataaagaaatttcccctaactgaacccttgtatgtgtaatcctgttttggcatctgcttcttggaaaatctagactacaatattatcaccaaccttagaaggtggtgaggactaaatgaaaaatcaggtaaaaaaatcatatgaaagacttagcatagttatataaacgattatggaaaagcctcagcctggcacatagttagcactcattattatcatatattctcatgcattatacagtgggtactgtagccatcattgtaccagtgtgagcaggttaatttaacttaggagactgcatttagaagtcaagaaacctgctttcctgccccttccctgctctatctcccgagttctctatcccctcacatgtgccctttatataagagtggcagttgttactcttaactccctaggctggccccggactcctctttttgggataaaggtgattaacgccgtgtggcttttgctgagaagggaggctgctacaggggtctgctgcagggacgttcagactcagtggatttgtagctctttagccccgcagagaggagcccctgccctgctgagctgtaggcttgctgggaggtagcaggagtaggtgggtgggtcactgaggggtgctggcagccgggtagtgttggcggtgggggctgagggaggatgatgggaagacagtgagcctccgagtgaaacagaccatgagaggcgaggtgagtcacaggtttctctcaaaacccccatgcccatggtctctagaatgtgccgaaagtggagcccgccatccccagcctaggccccagttctaagaatgcctccccttctctccctcccacagtcgcccaaattaatcaggtcctcggctttggggggtatcgttctcttttaagaatgcagcagagaaaaccgctgggttgtatcccagcaaaggaggccacagagattagggctgattgggaggaaatgtgagaagagcggtgtctagtttaggttttagaacctggctcttcctgctcacaccaccaaagaaaatttggcttgagagattcaaaagaggttgtgtggtgtgtaggctgcaaccctagattcctacagatctggattcatggtcttgctctagcacccagcagctcagagccctcagtgtttgtatgcgtcaattccccaattagtaaaaacagtgatttaagagcatctttgttatagcgctgttgtgagaatgagatagcgaatcagtattaacctttagcccagttcctaaattaaagccctatgaagagcctctcagctcagttcagagactgccagttcccccttgtgagtctttcttttcttttggatttttgatctccaacgactccataaggaagtgaaataattatccccattttatagatttgtaaactgaggctcagcttgattaagtacctaggaaacaatcctttgtagtacaggaccctgaggttcaacagtggtttatcgcctccttgggacaccacccaaaggcaaaagggaagcagcgaaagcatttgaagctcagagaggctcaaggccaagccacagcttagggacctgcaaagttcgcggagctgcagagctggacgggtggggcagaagccactctttccatcctccaggtccttgcggtggaacattcctcagttaccagcacaactcattttgagttttgttcacatgtcacttttctctttcttttctttctttctttctttctttctttctttctttctttctttctttctttctttctttctttctttctttctctttctttccttccttccttccttccttccttccttccttccttccttccttccttctttctttctttctttctttctttctttctttctttctttctttctttctctttcctccttccttccttccttccttccttccttccttccttccttccttccttccttcctttctttctttccttttctttcttctttttttttttttttttagagggagtctcgctctgtctcccaggctggagtgcagtggtgcgaccttggctcactgcaatctccgcctcctgggttcaagtgactcttatgcctcagcctcccatgtagctgggattacaggcacccgccaccaggcccggctactatttgtattttttagtcgagacggagtttcaccatgttggccaggctgatctcgaactcctgacctcaagttacccacccgctttagcctcccaaagtgctggaattacagatgtgagccactgccccctggccacgtgtcactttttcaatgacacctacccttattgtctgatttagaactgcaatttttcctcccacctttgactcctcactctgggcattctctgtaacccttcatggctctattttaaaaaatcgtttttattgaattactgtgtacatacacacagttatcctacttaattttcccccatagatctgatcaccttctaaaaatctgtataacttgtttataatggctagcatgtaacctccacaagggcagggatttgtgtctgttttatccatggacacatcccagtgcctggcatatagcagctctcagctacttattgaaggttggtgggaaattgctggcatccagtactctttgcagagaatgaagatgaacctccctgacttgacagtttcgtggagaacaacacaaggcgctgtatgagtcagtgctaagggctgtggtaacgacagcagcacgtgctgggtgggaccaggagcatgtccccagaagtctgtgagatccagggaagccctcctagaggaggttagttggcacttccatttctttagctcccccatcagctgagacagctcctcctgccctaatagagggaaggattcactctgtcaaacccagatacctcctgctctttctgcccatttcctcttgttctgccctcagtgggtcctgtggcggtaaccgcactaaccattccagcccatctcattccttaccccacagtcccagcaggctaagtatgggctgctgcagacaaattgcccacaggcttgtgtagcttggaaggggcaagcagcagacagcttgcccttggagtagggttgaacccatggatgcacatcctggcacttgtcatgaagcccaacacatagatgatgctcagtaaatataggatgagtggatggataaagctgagagttaaaagatgcctggaggccaggtgcaatggctcatttctgtaatctcagtgctttaggaagcagagcaggaggattgcttgagaccaggagttcaaggctgcagtaagctatgataaccaccactgcactccagcctgggtggcagtgccctaaaaaaaaaagaagaaaagaaaaataagatgctctgagaagacatttaaatgactcagtctctgtctagacacaacagtggcatcatttaaacaaatttctgttttttttttttttttactttactatgtgtttgtatttagcattttattttatgccactttccccaaatggaagcttgcgtgattgtattctgtgtggcacaaaatcaaggaaataggaaaataacaatgagaatgtagggagaggaggatacataccaaaagccctcactcagtggagccaagtggagctgaaacccggatagtaaaacctgctgttgtctagatgttcagacccctgctcctccaatgagccattctgaggacaaccctgggccacaaccctattgtgggggtaggagtatattccttggtcctcaagcttataggagaagtggagtgtcacaattcttacggggtcccaattcctctctgtatttatattagtatcacatgtccctaaacaggcatattgaagagtaggttgagacatgggcattctggggtatatctgagtcacagaatctcagggctggaggcccacaaaaggatacttttgtttatttctcaaactttctgaaatcatagatcaccaaatcataatatttgccatgctccacccttgcaaactttttacttaaaagatatactgactccaaacctctgaatagccacatatagagcataaactaaggggatggaattgttttaggtattgtggttgcaaaaagataacatttcatcagtcttcactaccagaacatagagaactctattatttttcccaattctaatagcacacttgcaattgttttcataggatctagactagagttccatgaactctataattgaagtcaccaatcccggaatgtacttactcctaagaaggagttctgtagccacattggaaaccacacccctttcttcttgatttgtcctcataggacatgaagagtggttggtgatgcctctttagattcattcagtgataacttacagcctgaggctttcatggggaagccaatgaacactgaacttcagagccttgacttgtggccagatgcagtggctcacacctgtaatcccagcactttgggaggccgaggcaggagaattgcttgaacctgggagacaaagtttgcagtgagccgagatcatgccactgcactccagcctgggcaacacagttagaatccatctcaaaaaaaaagaaagaaatgtgctctgtcataattctggagactagtggtacaacatcaaggtacctgcaggcatgtttcttctgaaggctctggagaagaatcctccttacctcttttagtttttggtggttgctggcaatcctttgttcatgggagtttaattccaatatctgtctctgtcttcatgtggttgtctttcctatgtgtgtatgtctctgtgtccaaattttagtcttataaggcctagtcattggattagggctcactctaatccagtgtgaactcattttaacttgatcacaactgcaaagaccctatttacaaacagggtcacattcacaggtactggagggttaggacttgaacataattttgggagacacagttcaacccacaacacccagtatggtcaacaacatggtgcagctgccactaaaggatcagcaatagtggtgaggctgcatcacaacagatgatcctggagaaggaggatgatcctcctaagctgcctggaccaggccagctccaggggtgtcagcaggacttgactcctctggcttcccttggctccatgacctcacactcccatcttccctttcatctttctggctgttcccccttggtttccattgctgagatctcttcctcaactcaaccattaaatgactgtgttcctcagtggcttaaactttctcttctcattctatatatatatatatatatttttttgagttggtatcctctcccatggctttagttatttatatactgatgactccagaatcttctggagacatctcctgaaatccaattagacatctctacttaggtatcttagagtagctcagctgaatacattccaaattgcgctcttgtttttttttgagatggagcctcactgtgtcactcaggccggagtgcagtggtgtgatctcagctcactgcaacctccgcctcctgagttcaagcgattctcctgcctcagcctcctgagtagctgggattacaggtgcgcaccaccatgcctggctaattttcgtatttttagtagagacagggtttcgtcctgttggccaggctggtctcaaactcctgacctcaagcgattcacctgccttggcctcccgaagtgctgggattataggcatgagccaccatgcctggcctaaactgggctctttattgtagtcctttttaatttaatctaatttaatttttgttttttaaagactagtcaaatgcagtagtgagaagcaggaaaagaggataacaaggagtttgatctgtagctgatagtgaacaatcaatcgagataatgtactacctttggaccagccaattcccaccccctctgccccgacactttttaatttttttaacctaggcttccttcaagatttccagcctcagtaggtggcaccaccatctgtccatttgcctatgaaatccttggtttcttcctttcctccactcctcacatccagccagtcaccaagtctaattgactttacatttgaactagctcacaaatgtgtctacataatgtcctagttattttgactaccactaccttggtttctggccaccctctgattttttttttttttttttttttttggcttggattactgtaacaggttttgaaatggtctcccagattctggttttattctcttcaaatccactttccatacagcagcctgaatgcaaatacaatcatattattttcctgcttcaatctctccagtagactcccaccctctttaggatatgagtcaacctccctaacatggcctgctagacactgcaagctctgaccccaacttacttctcgagcctcatttctctttattccctcttctttctgtcacttcccctgccccttgctttctcccccacatttttcacatgctgttctttcagcccagcacactgttcctcccttgctttacataattaactgacagtcatagttcaggtctcagcttaaatgtcctttcttctagggaggcctttcctgatccacaatttgcttgctcccatcagtgcctggtcaccaagttgcacaactccaaggggtgaaatttgcattgtattatgtgtgaatggtgcccctgaaatggtgcaatgcacgagccagcacactttgttcctcactgtcactgtttaattatcttccctcctggactgcaagctccaagtcagattctccgatgtaagtcttgtataaagtaagaactcaatcaatatttgttgaatcaataaatgagatcttaacagagaaatggctaattggaatgtgcacaagaaatatgaaacaaatttctggaaccctcccctcttacagaataatttaagtaattgaagatatttagtttggacaaatgaagatttagaacagatataatagctgctttcaatatttgtagggctagtgtgtgaaaatagaatacatttattctttttttatcccagaaagataaataaaagagctgaagacaggttatagggaagcaaattggggcctgataataaaattgaaataaacttccaaccctgagagttgtccagaaatgaaacagatggcacccaaagtaatgagttctgcttcactgcaaagattgaagtctgtaggatcgaactccatctgtaggatcattgagggcagcagctggacaagagagcttttgaggctctaactcaaaattttatcgtgattgtatggctgtggggaaagtttactttctacttaaactcaagcatttatgtaatgcctctgtgtgttggtcatcactggaaacatgcagaggtctgcactcatccctgtgctcaaaggtgcacagccaggttggaggcacagtgtcaagttcacaatctgaaggcagaaacttgcagagtatcgagtgtctaaaagttcagtacagagtgtggtctggcgttatgctggaaggcgtcacagaagagaaggggcttgaaaacggtcacagtggatgggcaagagctggagaggagggtccacttcaggaggaagaggctgatggtggagcctgcaagagaagcagacgtggccagtacacagccggcgtgcctcacacctttcatttacagcctcggagtctgcagtgggctttgcagcgctctggtttccctagctgaaaccaatgaggaagatgggatggggctggcctgagaatttgctaaaatgcaggagtcatgtcctgtggtgaaagggaatgaactcctcgtctatcctgaactcctttaaatattcggggtacactgtgtgagtcggagatgacttagctgctcagaagaaggaagggagtaagggaagccttggatcaaaggtgcccaacagtttatagcctcagacttcatgtgtctattttgtacatcttttggctgcaagcaactgaaaacccaattaccaatgacttaaaggaaaaattattatcttacatattgaaaatgctgaggtagttctgatcttggattggttaattcatgggtttaacaaaaacatcaatgtcctacttctttctgttatttcgtttgttgctttccacatgttgatttatcctctttggctgagtcccctcatggttcccagaagactttggcaattccaggcttcaaatgtggacatttagaggcagaaaaaaagcctagtttccttgcttttaagagtaagaaaatatttcctgatactccttcggtcctggagagactcagacctctctccatgttttgttatccaggttatatcacaaacccattcctaaatcagtcactggacaggcgaattaccatggaaggggcgcacttcccctgaagcacatggatgcccgatacctgaacaaaatcaggatttgttatcatgagagagaaggatgtcatgttttctcttgagttaggatgctaagttcttcaggtataatggagacgagggtagagatgacctggccagtactatttgccttacctgagctgggggtcccagtcaggatatgctggctgtgctggggtagctgtggttggttccttggtggagactgagattctcactggagcagtaggttgtgggttcaaccagatgacctttaaggcaacttacaatccttaccacgagcctggtattgtgctgggcccacagcacagtatctcttacaatcttcatctcagatctgcgagtgaagaattattattcctatcttcaggtaagggattaaaattatgtaactttcccaaggtcaatagtaagtgagagtgggaatatgaaatctggttagtccacgtataacataagtgtttgtccagtgtatgtctcactatgtctttcttccaacttaaaatcttccatgagtctggaacaagcctgggagtgtggcttagacctgtacttatcaaactctctttggctaagagccagattttttaaaaattttaatccattatggatcaaaattttttgtaaaatataaaaaaagaaatacttggaaaatgaaatgaaaatataataaagatatacaaaatacaagccctgttttaaattatttaatataacacacacacacacacacacacacacacacacacacacacagataatctgtcaaattgctataagattttccaaactcttaatttctgtacttaccttgccacaagctggcaacaaacagatcatggaccagccctggacttcagcccacactgagtagcactgattcagacagctttctgcctccatcctcttccctggactgcaactaaagatattcaatgatcggatgcctctgccgaggtgacagtgggagaattactggttgtaatgttaaggcaaacatcagaggaagagattagattttgccctgttgttttcataggaacttctgttttctttcttcctttcttttttctttttttctttttttagaagaagaaaattttattattcagtaagcattaactagaacgggatgtttgtcataggcaatttgcacatagattgcaaagtcagaaaacaaaattcacccttctatacagacaagcccatacaatcctttttccatacacgttctcaagataaacatgactagtcctcaacttgactagtcctcaagtaagacgacttgactgcactatttgttacacatcctagattcacctgctagcaggggtgaccgtctatgtttgctaattggatttatccaaaggaaaaataaatttcttcatatttttgtgacaagaggtgagttttggagagaggtgcctgcccacgttaggctcctactctccggaagagacgggaagtaggggcactgtcttccttaatgattgcatttcaaagagatggctcccgggtacttgagaaagacattcctgaagggaagaaagctggcaagaggcttatttaccttttaaaaagatttacataatttcaaacaggtagagaaagaacttaaaattacaagttttctaaagtaaatgctcacagggaaagttaagcctcttttttggaatttttaaattcagaggtacaagtgcaggtctgttacatgggtaaacctgtgtcgtgagggtccactgcacagattatttcatctcccgggtattaagcctagtgcccattagttatttttcctgatcttctccttcctcccaccctccaccctccaggacgtctattttcttcaagagatttatattagacttgagaaaacaatttctccttccttccttctttccttccttccttccttccttccttccttccttccatccttccttccctccctccttcctccctccctccctctctctctctttctgtttttctttctttcttctttctttgtttctttctccttccttccttttctttctttcttctttctttctcctttccttccttccttcctctctctttcttctttctttcttttctttctttctttctttcctcctttctttctttcttcttctttctttgtttttctccttccttccttcctttttctttctttcttctttctttctccctcccttccatccgtcctttcttccttccctctttctttcttttctttcttctttttttttcagcgtcttggctctgtcacccaggctggagtgcagtggcatgatcacaactcactgcaacctcaaactcccgggctcaagcgatcctcccacctcagccgctcaagtagctgggattacaggcatgtaccaccacacctagctaattttttgtattttttttgtagagatggggttttgccacattgctcaggctggtcttgaactcctgaactcaagtgatctacctaccttggcctcccaaagtgctgggtctacaggcgtgagccactgtgcccggcctcctaggaaacaatttcttgatggtgattttccatctttttgctgtgtaggaaagagattgagctccatggtaatatgtgagagagaagagactcaagggactaagaacctgtaccacaaaaggaaggtctgttttggagatttgctggagcttccccattggatgtgtcattgaatgatgattcatcctggccaaaaataaaagcttcttaagctgggtgactctaagtttgtgtgtggtttacgcttggacatgcgttacttttatgacataaaagtgacttcaatctggtaagatatatttataaacatagaggtcctttcatttattaggaaattccaattgtgttacggggtcttctcaagagatctaaatctattctcctctaagatttaggaaatctaagccgggcatggtgtcactcctgtagtccaaacaccttggaaggccgagacgggtggatcactcaaggccaggagtttgaggccagcctggccaacgtggtgaaagcctgtctctactaaaaatagaaaaattagccaggtgtggtggcatgcacctgtaatcccagctacttgggaggctgagacatgggaatcacttgaacctgggaggcagaggttggaatgaaccactacactccagcctgggtgacagagtgagactgtcaaaaaaaaaaaaaaaaaagtttgaagaaatctggaatgatcatttgtccagtatatgaaactctgagaatactacacatgtggaaactagaatctatcagaaattccaggatgctcaaatatcttctccctctccttcattcacaaatgatttgaacacttatatttttccttctactgctttctactgattttccttctactgctgtgagtctgatgggcttcaataccattgtggttgacttatccaaatgtgacttttcaattctgtgacttttatatctccaatgaccttttctttgcctctacacagcaatttgctctaacggttacagcctggattttgttattcctcaaaatgataccacctccaaaaatcccttcatttgagcattccattctcttgccacagcctcctctctttagtgattcagatactcccactacaactcttccttgacctcatgatcaacatgcttccttttcttttttcagctctctcctgcctttatttcctgcattattgaacttagactgcttggttcatcttttcattcaggctcttagctatacagacataccttagagatattgtggatttggttccagaccactgcaagacagtgaatatcacaacaaagccagtcccacaaattttttggtttcccagtgtatgtaaaagttatgtttatactagactgtagtctattaagtgtgcaatagcagtatgcctaaaaaagtacatcaatatacatatcttatttgaaaatactttattgctaaaaatgctaatgatcacatgaaccttcagtgagttgtaatctttttgctggtggagggtctcaccttgatgttgatggctgctgattaaggtggtggttgctgaaggctgaggtggttgtagcaatttcttaaaatagacagcagtgaagtttgctggattgattgactctttcacaacagatttctctgtagcatgtgacgctgtttgatagcattttgcctacagtggaacatctttcaaaagtggagtcagttctctcaggcctgtctgctgctttaccaattatgtttatggagtactctaaatgttttgttgtcatttcaacaatattcacagcatcttccccaggagtagattccctcttagtaaccactttccttgctcattcataagaagcaactcttcatctgttcaagtttgatcatgagattgcagcaactcagtcacatattttcagtctgcatttctagttctcttgctatttccaccacatctgcagtgatttcctccactgaagtcttgaactcctcaaagtcattcatgagggttgaaattaacttcttccaaacttctgctaaagttgatattttgaccttctcccatgaatcacgagtgttcttaatggcatctagaatggtgaatcttttccagaatggtttcaatttacctttcccacacccatcaaaggaatcattatggcagctatagcctcacacaatgcatttcttaaataataagacttaaaagccaaaattactccctgatccaggggctgcagagtagatgttagcaggcaggaaaacaacattcacctttttgtaaatctccatcagagctcttgggtgaccaggagcattgtcaatgagcagtaatattttgaaaaacatcttttttctgagcagtagatctcaacagtgggcttaaaatattaagtaaaccatgctgtaaagagatgtattgtcatcttggctttattgttccattgatagagcataggcagagtagaattagtataattattaagggtcctaggatttttagaatggtaaatgccctcaaggtgggcggatcacaaggtcaagagatcaagaccatcctggccaacatggtgaaaccccatctctactaaaaatacaaaaattagctgggcatggttgcgcatgcctgcagtcccagctactcgagaggctgaggcaggagaatcacttgaacctgggaggcagaggttgcagtgagccaagttttcgccactgcactccagcctggtgacagagcgagactccgtctcaaaaaaaaaataaaaataaaaataaaaaaggaccttggcctcaacttagagtcaccagctgcatcagcccctaacaagacagtaagcctgtccttggaagctttgaagttaggcattgacttctttctagctatgaaagccctagatgacattttcttccaatataagaatgttttatctacattgaaaatccattctttaatgtagccacttttatccatgatcttagctagatcttctgtttaatttgctgcagcttctacgttagcacttgctgtttcaccttgtacttttacgttaagaagatggttctttttccttaaacctcatgaaccaactactcatagcttccaacttctcttctgcagcttcttctaatccagagcaaggaccttgaattgaagagagtgagggccttactctggattatgctttgacttaagggagtgttgtggtggatttgatctatccagatccctcaaactttctctgtatcagcaataaggctgtttcactgacttaccatctgtgtattcagtggagtatcacttttaatttccttcagaaacttttccttcacatttactggctgtttggtacaaaagccctagcttttggcctgtctcagctttcaacatgccttcctcactaagcttaatcatctctaggttttaatttgaagtaagagatgtgtgagtcttccttctccttgaacacttagagaccattgtaggattattatttggcctaatttcaatattgttacatctcaaataatagagaggtcctaggagaaggagagagctggaagagcaggcagttggtggagaagtcagagcacatacaacataaatgaaatgtgaaattactttctaaaccccatggagggaaatgaacaattcccttttcccctaaaataatgctactaaagcaattagacttagtctagacaagacagaagatgtataagtgaaacattagaagatccttaaatgaagagtgaattgtagttgttggtgaaaaacaagattaattttatatttgctaccataaagtttttgtgtatcacttatatcaataatgttatcaaaagcttacaaaaacaaaaatagatttactttttaaaatgttgttttaattttagagaaaattgtctatttaaattgagtgaaactgcatgcgacatatgaacaaaagtgacagttcaatacaacataagaaaatcagagcaaggaaaatatttttctgactttgaaggcaaaaattcatgcacaaataatcctcaaactaatttcaatagaacctattttctgctcattatagaacaagccataatctcaacagtagagagatttgaacaaattggtaactttgaaataatttaagatgtagcatatggttctagatattgctttaagagataaaaattacaatataagtgatagcaatttataggatgaaattaaagcattttatattttgtgcaagaaaatagaatacacatgacattgatcagttaagttctctgtcttatatggacacagtttgtggtgccccaaaacaactacagtattagcatcaaagatcactggtcacaggacatcacaacagactgaataatcatgaaaactttggaatattctgagaattaccaaaatgtgacacagagacacaaagtgagcacatgctgttggaaaaatagtgtcgatagacttgctcgtcatggattgccacgaaccttcaatttatgaaaaaaccctgcattatctacaaagcacaataaagtgaagtgtaataaaatgaggtacacttgtactctcaactcctcctcctcgtctttttgttatactcacggggcaaaacaattctgccttctatgtattgctcccccggctgccaaaagaatcctgagaaaaatgatatagtctggcagaccatttcaattcatgatcacctacctcaactgagctcaacactgcctgggaatctactacatttctctagagtcgtttgtcttccgtgtctctgcaaacatcatttcaaacctttgtttctctccttaaaccgccctgcattctctccttattcattctcttaagagtaaatataagtcatctgatgaaattaacctcaacttcctgccaacgattcttcaaaccaacctgcttctgtacccaccgtctctactttcttcctgttattattcagaggaggtgccctcttcatttcaaaggtagttctttgctctgcctgcatcccaccccgtcctgctttctgagtaacctgacttcatcagttctcccatctcactcttctgtcttcaacttcttcttctcctctcctggcccaatgtcttgaaacagttgtccacgcttgtcatcctattattattatttgagatggagtcttgctctgtcacccaggctggagtgcaatggcatgatcttggctcactgcaacttccacctccctggttcaagcgattctcccacctcagcctcccgagtagctgggattacaggcgtgcaccaccacacccgactaaattttgtatttttagtagagatggggtttcaccatgttggccaggctggctggtcttgaacttctgacttcagatgatctgcctgccttggcctcccaaagtgctgggattgaaggcgtaagccaccacgctggtatagcaggcatgagccaccccattttttcacctcctatttcatgtgcaaccatccgtcttccatccctaccgctctacatccctacagctctacatccttacagctcttcttgataaaatcaacagtgcctttcatgtgttccatgcactaggggctcttttgccttgattttacttgacgttttgatagcatttgatctagctgaccattctctttctcgaaatagtttctttccttgtcctcagggatgccactctcttctggtgtttctttttatcgctcaggccactctttaatgagtctctttgacagcttctcctgctctggcttatgaatatctgggttcttcggagcttggttctgggctctcttctcttccattctgcactgttttcccttggtaatcttacccactcccacgattttactcaccatctttgtatcaatgacccccacatagtgatctccagactcaatcttgatgtccatctgaccacgtgtatattttcacttaaagactcagaggcacctccaactcagcaggaccagtgtagaccagatcaccttccccttcaaacttgctgcttctccacccagctgctcagacaagagatgagggttcaccttggccgtcgcccactctcaccattctgacctaaataattgcagactatttgaaaccttgcacttctctcaattcctgtttattaccaccttagtccagaacacaatttcttcctgtctggactggaagcaaatggctcctaaatggtctcatacagaaggtatatattatcctctctgtttaatagccttcaatggcttccctttgctcttagagtctaaatttttgaccatagcctaccatccctgagtgatcagacccatgcccacttcttcaagctcgtcttaaatctctccccatcacatataatgtcccttactctctgtgattcatcttttagtttctcaaagagtttaagtttcttcttgcctcagggcctcagaacatgagatgggatggagaagtcagagagctgtgaagagagcccagggtccagctgggtcgtgaattggtacaaatttacctttgctccagagataaaccccttctcccccgttctttgctgttcttagtggtctttaaatctgcaaaatgctctgcttcttaccacctctctcttcattgggccagctcctgctcatccttcatgtccagttgaatgttaccatctcatgaaagcatcccctagccctgagtctaggttagttgctttctgaaatctcacacttctaattaatagaaataatcatgattataataacattatatagttaactttataatatctgtttcctcaactagctattaaatccgtgtagctggagccaggattggtgggaggctgaggaaggaggatcacttgcacctaggagttcaaatccagcctgggcaacatagtgagacccccatctctatttaaaaaattaaaagaaatccacgagggcaaggattatgtctgtcttattcactgctttttcttcgacacccagcatagtacctggagcataataagttctgagtgaataagtgtgtatcttgtaaaacctctggcttggcttgcctccaagccagaggtttggagactcctttccaaaaaaaaaaaaaaaaaaaaaagaaaaagaaaaagatgtaatagatgactgccaaatagaactctgattgacatgaggcaacctgtctttccacacaaagtggatgactccatctttgcagattatggagaagcaatctgcttctctttcgatttgggtgtcatgatcatcagacatgaatgtggagattattatgtagggagattcaattagttacttaatgccacatactgaccaaagttactaattcagccttggtgaagagtatataatagggtcagtttgcggaaataacatcccacttccctaagtaatgcaggaagacttctttaaataagcataagattccgggttgtatactggacacacaatgagctctgttatgcaatggcttcatgaccttggaaaatatttttttcttgaataatagtaagggagaatagaatagttggctgaattctcatatttcatattgctagcagatcagcagcaatgatggagaaagcatatttgagcaaagtccagtgctgtaatcgaataagctttctacatggttgatctaatctatacttaatagtatgtgtagctattattgctctaaatggcagttaggcatgtatattaagctgttcactggatttatagaactctaggggctataattcataatgtgtatttttttacttcaccaagccaagcatttctgaggtcaccttcaggaaattgaaagtgggcactcaaaaatggttgcttcctttctttcccttccaagtgcagggacaaaccatttactctttccgcccagaaatggtggtagggaggcagaaggcactgtaaggaaaagcccaggtctatgattggtacaagcgcaaggcatgtccagctattttccatggtgttggcacctattgttccatctggttggatgggagcattttcccaaatgtctgcgatagagctgcttttattaagtatttactctgtgccgggagacttttatgtattcaagcctttattttttctgacgacaccttgaaagagtaattattctctccatgttacagaggagaataccaagctagggaatgtctcaaggtcatgtagctgagaagtaagtggaagcctgggctcagactccagaggctgtgcatgtcaccctgtgctgtagagtcagaggtacgctgtgtcactttccttaggtcttttatgtcccccttgtcctctccagccagggtgccaaggaggcctctggaagctaaaggctcaatggcagctcaattctgctgggggagggagctgttgataatacacagataaatgggaactgcctggcaaattaggagtgcagatgctgtagacacaggaatgagtcctggaggaggattccagtgggaataggcctggtggactggaggagtcagtggctggaatgaggaactacaggctcgaacagaatttagaggtcatctagtttagcgacttttaagcttttaattgaaggactgctgctattaaatttctccagagactctctgttttaaaatgttttggctgcttaaaaactttttaaagaaataattccattttctgattgccttaatcaaagatgtaatagatgggctgggcatggtagctcatacctgtaatcctagcattttgggaggctgaggcaggtggatctctggaggccaggagttcaagaccagcctggccaacatggtgaaaccccgtctctactaaaaatacaaaaattagctgggcgtggtggcgggcacctgtaatctcagctacatgggaggctgaggcgtaagaatcgcttgaacctgggaggcagaggttacagtgagctgagatcgtgccactgcacactccagcctgagcgacagagcgagactccttggcaaaaaaaaaaaaaaaaaagaaaagaaaaagatgtaatagataacggccaaatagaactctgattggcatgggacaaactgtcttcccacacaaagtggatgactccatccaaacagggagaagtgctttttaatgagcttgtgcagacttatgagaggaggtgttgctaaatgcacaatttccatgaggctttttcaaattttggaaattgctcagactacccccatcacctgctataagcgctgtcactcttgtccccaggagcgactggctccactgtagtggccacagaggtgaatggttttccccaagggaaaccattgattcagacctattttcttatttattgttgaggaaactgagtcccagacaagttaagtaaaatctttgaagtcaccaagtgagttagtgcctagaaggggtattgaataatggaacccatgtgtcacctgggacccactagcccctgaagatatgcaattgactggttcattctgtagccagttctgtcgcttatgaaagttgaaagatcttcccattatttaaaattctgggtttatgttcttacaattcagctcccatttccttggagtgttaggtctggttttccctaaatcaccccaggactaaagctggttcccgtattccacagttaaaactactcatataagtgttttgagggggacacatgtcacagaatgggaagttttgtcactgaactaacttgcctttctcctttcctttcctttcctttcctttcctttcctttcctttctctctctctctctttcttccttccttcctttctttctttctttttctttttctttctttctttcttctttctttttctttttctctttcttccttcctttcttctctctttctttctttcttccttccttctttctttctttttttctttcgttctttcgttctttttcttttttcttttctttctttctttcttttttttttttaagtttcgcttttgttgcccaggctggagtgcaatggcacgatcttggctcactgcaacccctgcctcccaggttctagcgattctcctgtttcagcctcataagtagctgggactacaggctcgcgcctgactattttttttgtatttttagtagagatagggtttcatcacgttggccagactggtcttgaactcctgaactcaggtgatccacccgcctcggcctctcaaagtgctgggattacaggtgggagccacggcacctgctctcttctttcttttcatctctgatctcttccccttccttctgccttgtgcttcactcccagggtggaagaacccatttgcttcttctctaatttctgtcagtggctgcataggtaaccacattgtcatcacagattgcaggggcttctcaccagttccaccttccttacctccaaagccagcatcacagacaaacagattttcattctccactgttttccaaactcaagtgtaagggcacagagtagacatggaagagaggaaatggatgcttttcttagagaataaaggcttgttgaaaaaaaaatcccatcaaaacctcatctctgtgctccctgttcaaaacacatatgtaccttcatacctgagatttcatttggcagttatagcaaacctggtatattagtcagctcaggctgccatagcaaaataccacagactgggtggcttaaacaacaaaaacgtgttttctcaatgttctggaggctaggaagtccaaaatcaaggtgctggcaaggcaggtttcattctgagtcctcttctcttggcttggaggtggccgtcatctcactgtgtgctcacatgacctcttctttgagcacacttgggggtagtggggggaagacagcaagctctctagtgtcttcctcataagggcactaatctcatcctgagggtcccacccttatgacctcatctaaccctactcacctcaaaaagttccccacttcaagtaccatcacactgggggaaagggctttaaaatatgaattttggtgagacacaaacattcaggccatagcacctggggagacgttttgctagtattccagatgagaaactaagccttagagaaataaatctattagagtgagcctatgagagaggactggtgggagtgtgcatgatgatggcctatccaggcacactgaggcccacccaactcctcccctttgccctgccagctcaagagcgcaaaactatttcttctagattcttaaaaggttgtgattgttttaaaataggtgcacaaattcttggacactcctcccttcaaaaggcagaatctaattccttttcccttgaatgtgggctagacttactggttcacttctaacaaacggaatatagcagaagtgatggtgtgagatttctggaattaggtcgtaaaatatactgcaactttctccttattctctcttgcatcattggctctggggaggacagctgccatgttgcgaggacactcaagaagccctgtgaagaagaaccaaggccacctgccaacagccctgtgagtgtgccatgttactcatgaatccgttagcccagtcaggccaccaggtgactgcagccctggctgtacttctgacaaagcctcattagaaatcctgagatggaattcctagttgtcactcccagactcctgacttacagaagctgtgagataacaaatgactgttgttttaagcagctaaattttgaagacagcaatagataattaatacaaagagaaaagtattttattctatactcagttctccattctccatgttacccatgtggccaagccagattgacatttctcatgctcccagacagccagtgggtcaaagaagaaattaaaagagaaatttaaaaacatcttgagacaaacaaaagtggatacacaacatactataaaacctgtatcttaatttttcatgatacaaacagaattatattaggaaagaagaatgatgcagtaatttacctgtgaaaatgactttaggagtgtaggataatcattaagaccacggactgtcttttaatagctggatgaccaaaggtaaattatatagcttctctgggtctcattttcactacatgaaaaaatggagatattaatagtgcctaatagttttacctgataattaatgagctaatatatatcaagtacttagcaaagtagccagcaaatgactttagtcaatgttcatattgccattaacataaatatcaggtatactggaacaattatacacacaaacagatgataaattggaagtgcagagcctatgttttctcccaggttaacctgtgatcaactcatgatttaaaaagctgggttaatatggttgtttagaaaccctgactgtcaaatatgatctacagaatgttagattattaaatcccaataaagcaaatgtaacagaaaaaaatgactatcagcttcctcttggagaaaacagcaataatgccatcttattgctacataatacataccaaatggcttaaaataagtgactagcttaataaactgtagttgcttaataaattgtagctatcattaacatcttttcagctgtacagctttttttcaggtgagtttctgtttgtttcagatgcccacttcgctcagatgaaatgccaggctcaaactaaagtcagtatgcattgcctggaaggctaatggcctaagccttccaggccaggggacttgtgaaccctgaaaatttaagacaggtctcagttaatttagaaagtttattttgccaaggttgaggacatgtgcccgtgacacagctttgtcacacagcctcaggaagttctgatgacatgtgcccaaggtggttggggcacagtttggttttatacattttagggagacatgagacatcaatcaatatatgtaagaagtacattggttccatccagaaagatggggacaactcaaagcagggaaggggcttccaggtcacaggtaggtaagagacaaatggttgcattcttttgagtttctgattcttttccaaaggaggctatcagatatgcatctatctcagtgaacagagggatgactttgaatagaatgggaggcaggtttgccctgagtagttcccagcttgacttttccctttagcttggtgattttgaggccccaagattttcctttcacagactcaggatgtcttcttcagttcaggatggacagcctcagagtagagagcttcaggccccctctccttatcttctgctaacctccattcttactcctaccctttcatctcagaattttcgctttgatgtttcccacttccttcctatggttactttaaccgaagtgagtcaggtcttactgaaaaactgaccacagcctgtccgctcccagccttccccagaccagggctgcccaggcagagcgtgagggggactagtgtttactcagctcatttttttcctcctctctcctctaagtcacggggctttgagtagggcttccccagccaccgtgcccctcccagcagaccgcagtcagaagccaatctcacatttgtctggtggctcagagaggggacagaaagagcagcagcttatgtccttggctatcctctcaagtgggctaatttgcttattttcaactctgttgggtccagccctgttgcctctgatctcagctcaaagaggatttggcgggagtttttggttgtgataaccaataacaaccaactatacgcactgcgaacatctcctagtgccagaagccctgttagctcattatcttaatcctcaggataacccaggcaatttgtattcaccctaaaaacttcccctggccgggtgtggtggctcacgcctgtaatcccagcaatttgggagactgaggcaggcggatcacttgaggccaggagttcctaaccagcctggccaacatggtgaaaccccatctgtactaaaaatgcaaaaaattagccgggcgtggtggcacatgcctgtagtcccagctacttgggaggctgaggcaggagaatcacttgaacctgggaggcggaggttgcagtgagctgagatcatgccattgcactccagcctggagacagggcgagactccgtctcgaaaagcaacaacaaaaacaaaaacaacctccaaaaaaccttcccctgtttacctttctaattttggtacctacagaatctccccgttagccttgaaaatcagcatgatctttaaggatttaggagcaaatctttaaaggattgagttgtgggaagaccatgatgtctttgctactggcttttgcagtgagaatagctttttctctgatcaggtttggagccttccctctctcctgggggtagggggtagctggcttcctttctctgaaatgcagaattcattcacccactctcttttgtcttgggagctttgagagaacaattttagtcagacaagagtcaactgacaccagaacatgatgtgaataagatacatttatttattcaaaattaaaatctgctatgaagacagacaaacaatgtaacattcccagaggaattgaataaattctagttaaaactgagttctattagaaccaaatttatttttatttttattttttgagacagagtcttgctctgtcacccaggctggagtacaggggcatgatatcagctcactgcaacttccatctcctgggttcaagcaattctcttgcctcagcctcccaagtagctgggattacaggtgcgcgccaccatgcccggctaatttttgtatttttagtagagacggggtttcaccatgttgaccaggctggttaggaactcctgacctcaagtgatccacccgcctcagcctcccaaagtgctgggattacaggcgtgagccaccgcgcccggcctagaaccaaatttaggttgttataaataacaagctggccacagctttcaagaatgaagtggttggggaatgaggttaggggaatccctccgagacactggaaggtgaattaatcatcaaaggggctccctggtttctcttcctaagagtatttgtagcagttaggaagccccaagcccagagacaagataaattagagggaggtcagggaaaacagctcaacagctagaaagcgtggtcaggcttggaatggaagcttctgttggctccccaaagaacattttttttcctcccttatgtaacttataatttatcttaaaacactcaaataccatagtgtgtcaccctatggaaacagcttaaaaacaggtgaaaataataaatattgaaaaaaattataatattgggcttctttctaaatcgttcacagagaagctcagtaaataaatagaaatgggggttgaggtatcagaggtaataaatattctataagagaggtacaataaggtttctcaaggggctgggtcagctatcccagagccccagatccgattttggagacctctaatttatgtcctagagtctatagagtcgccaccctgatgtctcagtttcgtatcttcattgtcatgtaggcttctatgtagttgatgaagatgtcaaactcactcatggctttgtagatgcctttctcttggagctgtgcagagagataagaaacatacagttaaaatcctttctggggactaaataggctcccctccctcatgctcatggatgggcatgaccttgagtgcagaggttgcttgttctccctcacgctgggaagtaaaccagaggataggcctagctgccttgggaaaggctgtgcattgaccttcatctcctccaggcctccccctagcaaggggagcattcattttgcaaagcactgtcttcaaaatgatgccttttcaacaattttaaaggtcacgtattcacatgatgattatgcagagtttgatgaaaagacattagaggaagcgcttcgaaagcaagacggtgagaggagaggagggagccttttaaatgtctgtgttctcccaccaacacactgagcaggccctgccctgccgccctgacctactatgagaaattcacaccccctgatgttggcactctgtgcagtgtctgtccccagcccacgaggaggacataggccgcacggtttctgggaaatcagactgaaaaagttcacgcacagttggaagtgtgaaaccccatttcgtttgggaactgacattctcaggcacctccgcaggtgcgaagggcagatggaaagcgggcttgaaccaactccaggttaagtgagaatccagcttcctgctcattctgagttctggggagtctgggctgaacccccaggtgtatttgtatgtgcacatttatgtgccagcttcctgcacgtgtgggttcagcctagattcccaacaagctactttctgtactttctgtttcctttgtcactctccccagcatgcagctcactgtgttcacaggctggccggccagcctaacccgcaagcctgcaaaggcagcgagcagtcatttagaaacccccaaagacacttaacagaaaacaaatacaatcaaggcagcagctcctcactggctgagcaggtcataccatctgtcaggttcccacactctctccaatgaagaatggggcctattgagtccccaccaccttccatgctttggggttggggagtgggcatgggttgtgctctgcagaccctctctgccaccatccaagctcaccttattaaaggcattcttcacctgctccacggccttgctcttgttttcacagggaagaaatcgatgctgtggaagaaaagagaaagtgttggtgatcctggcttccagctccatgtccatcacacttaggggacaagctggtggcatcatgaggaggccagatttatccaaatgccttgcctcacagctcccagagagaactgagccctgcttccatggccctgggagttaaatgtatttctccaggactcactccaagatgtttgcaaggcttggatgacaacccaggtcttgggattccttcctcccccagaactctacagtatctcctgcagtgctgagcgaggcattcttcagcctgtccttttctgcctctctctcctgttcctccccgtcagtcacagccaccgaggaacacttctaagcatctgaggagggaagctactgggaccaaacccttcacatagccttgtcctacaaatagacaccaactgattttccaatattggtgacagaacaggggaaaccattagtagtgagggcatcatttcagttggagaaataaattacctggaggaattactcatagacactagcctggggatgaatagcccccttgtcccttctaaaatgccaggggaaatcctgtcagtcaattgggcccttcttagagctttgctttcaaaacattgagattaaaagaggtgaatgatgtttcctctgcttgggaaccttagctccccgcccagggtctagttacaaagaggcagtggaggcctgactgaagctctgggctccttttatgaagagagaggggagtagttaataacccacaaatgactcacaaataacaggaaagctgtttgcaaatttcacatgtaaatgcctagcagccacccccaacgcctgctcaaagagaaatgagcaagagatctgactccaggagtctttcctcatttacagctagctctgccagtctgtgtctttgctgtgtctgtggatgtgagtgtccctgctggtctgtaggagatggtattttgggggcagctgcaagggaaaaaactgatctgctacttacacagcgccgtagcctcagcctgagggtcttcaggttctcccccagggagttcacatgcgccttgatgtctgggtcttggttctcagcttggggcatcacctcctccaggtaaaactggatcatctcagacaaggcttggcaacccaggtaaccctaagggcaggagccaaaggtgagtgagagattggcggaggtggctgggaggaggggctgctgcaactagcttaagaggacagcttggttctagcgatcctccttcaccagaagcctccccgaagggactgagccctttgtaaaccctctggctgctggatgtgctgagttaacatcttcccacttctccttttcaaagcgaaggaaacaaacccaattccctgcaatcaggaagcagagtctcccttcccttaatcatgctgcacactcccccagcaccccgcccctgctctcaccttaaagtcctccagcaaggactcctttaacaacaagttgtccagctgatccttcatttgctgcaggaagaacaaaaggagaatgaacttgaggtttggggaaataactgaaatgcggtctttttgatgccctttcatttagagatttttttttttaaataaaattggctctggcccaaaaaaatcaaaaggggagttttaaaaacagaggattcaacagtgatgggaccatcacttaaatcaggtcctcctcctcagagtcaagttatttaaaaaatctggccgattttgaagggaaagcagaagcttgactcagtcctggtcttctttctgcggagctacattcggctttaagggacacctatgtcaacccttcggggccttgagcccccctcatgtcctgttctctgcttttctttctccccactgtagacatccagtttagcttggaaagatcccagggattaagaagctccttctaatgcaggtttccctcatgtagagtgcttccctaaaccactggtctttcaggtctggaaacgctctaagcagaggcaatttaaatttccctgctgcaaggcatggggagcatcttcacctcgaatcagacatttctttacttctcctagccaataaagtatagagcgccagcaggatcttataagtttctcagcacgagagagaacgcatttactttataaggcaggtttcctgcacatttactgtatcatctggcttagcttaactcaccaaacccatggcttgatctaggattctcttaagaatttaagtttgggggaataggtgttggggatggaggtggaggcgcaggaggagggttcttatagttccaggagaatgtctagttcaggcagtcccaggaagagagaaaggacaggaaggaatcatactcacaaagaaagtcttcactctgctgaaggcatctcggagatctcgaagcatgttaggcaggttgcctgggaagtgggtgcagctgttctcagactgggtgccctggcctgggctggccctcaccccagtcaggaggaccaggcaacagagcagtgctgagctgtgcatgccttcttttgcaagtctgtcttgtggtttggttttgcaagagcaagcccctgatgtgtagaccttcacctctctgtcccccttttatattgtaagctcagggaggcctcttcattcattaaaaagccacaatcaaggtttcccggcacaggattttttctgcttagagctcctccttctctaacctctctaataaacttagttttcaatttttgcatcgtaagcaaaaatgattggttgaacatgaacttctgcattacagctatttttaggatgggctacctctcttagaataattttttagcttctcaattaaaaaaagttgatttcctggggagaacagctgttctgtgcgcagaggccctcagctgtgggttctcattcgcgtgttcctaggtcacagtgacgtggacaaattgcccattccagaatacaatgggattgagaaataattgggtccccccaacctgggatgaatacccaagacttctccttgctaacttaggcagtcaccttaggtctctgggccttagtttccccaagtaaaaatgagggggtgggctaaatatcctcaaagttcccaagcagcccttccattttactttccagagactggcttcctacagtacaggcggggtcacaggatgtgttccaggctcctttaccccgatttcattaggattctcaggcacatgtttccacctcttcagctgtcccccaccccaactgtgcttgggggaagtgggtaagagtagtctgcacttgctgaaagcttcttatatgctagtcaggtagtgctcaccatgacccctaccgtctctattttatagtgagcaaactgaggcacagagatattacatcacctgtacaagggtacaccagtgccaactgagaatttggtttcctcaccctactgtacaccatctccagcacatagaatgaaaccttggattaaattggccttagagtttcttttagttgtaagcttctgtggctggagtctaaagtttaaaagatggggtggaagaagttgaaataacaaggaaaagaagtcaggattccatggaggctggataggaggtcccttactttcctcttacctatccctacttccccttcccaaagaagccttagtagtgttgtcttggatttgtgtgtgtgtgtgtgtgtgtgtgtgtgtgtgtgtgtgtgtgtgtagaaggtaaggggagccagttgggttgcggcgaggagtgttgctctacctggggaaggaccggggcagtgacatcaggacttcttcagatatctggaaagtctctggggatcctttgattgagccttcaccttccccttccacaggggctttgcctgccattccagtttagactgtaactgggaggaacactgacctaggtgcaggaggcctgggctctgccttggccctgccactctatagtcagggcaaatcactcatcctccctgtgtctgtttttcatctgtcccaacagggcaatagcacctgtcctcctgcctgccagggagcattgagcttaagtagccatggacccagatggagggcatttccagtgttctgctagttcttcacctttctgcatcagcaatgggacaactccagtggcagcaggttctgagcttgctgcactagagaaggtcactcactgcaaggggtgcaaacaccttggggcccagccagcgtgaagtgagtgggagggagggatgagagggcccacgcccaccctgtggatgtccctgctgtgtgacctatggatcagggtcaggggactgtggtgtctcttcccaactcttcagggagtgtcaatgtagaaacctaagaatcaggaagtgagaaagagcctgctagaaactagtatggagctaactcagaacttactggtcctgccagacttagactggcttaagggttctgtctgagttctgctgccaggaagcagagagaaggggaccaggacctgggtttccccttcttgcacctttctccttccccctcggctcctgggttttctgggctgtgtctgtgttagcctgcaggtctaaccccctctctgagctgggtgttccagaagtggactcagcatgggcaccaggcaggccaggggttctggactctgggtgaggctgtgaacccctccttcctttgtttcccatcttgccttgtgcttacctcactaggaaacctgcaaccctacgtggttatcattcatgtacacaccatgccctgccgaatcagctttgagctccctgaaacaggacattgttttattaatctttgcgtacttggtacttagcaccaagtctggcccttggaaggtatcagctatacttgggatgggcatagaagagtgccctgtaagcctggagggtgcgaggctaaggaggtggtctgggcacaggtaagcattcagaaggagagggagagtgactcagggatgcaggcagcctcccttcaatttccttatatgagatgtgtgtgtaaatacacacacacacacatacaaaatgtcagggagaagggaggtatgtaaaagccatttgtacctttctttcatctataatctgttaaatagggttgaggttaggatctgacttcttttttttttttgagacagagtctcgctctgttgcccaggctggagtgcagtggcatgatctcagctcactgcaagctctgcctcccgagttcaagccattctcctgcctcagcgtcccgagtagctgggactacaggcgcctggcaccacgcccggctaagtttttttatttttttttgtatttttattagagacggggtttcactgtgttaaccaggatggtctcgatctcctgaccttatgatccgcccgccttggcctcccagagtgctgagattacaggcatgagccactgtgcccggcccggatctgacttctttatttgttctgaaatgtgtagctaattatctcaagccatttgctgaagatttgattctttccccattgatttgaaattactgtccactctcatttcaaaatttcagaatttaagtggttggagagaaccatgggcaagttccctggtgcaagtcctcatttagcatatggagataacggcttctccatcaatatgtctcatagtatttctgtcaagagatagatatgaacatttgaataaagaccctgtgtccttatattgacaaagcaacaagaacaacaaacaggactcctatttctcaagtttttgaagatacctgttcatctgaaaagtcactggggtccacggggaaaagtcccaagcccataggtcatgtctgagacatgaatgccaacactcacatgtgaggagatttgggtttggattttggtacaaggcaagagcccatgaagagagggaagtgagaaggcaggcacctatggatggatagaatgtcagcctgggcacaatttagtcctgtgaatttcaagaggacacaaatgccactctcacactgtgagcttcttgaggccaaaaggcctgagtccagtttgccctcaagcccagatgcatagtaggcatctaatcaatgcttattatactgattttaaatgaatttttccagtgggggatgtactgggaaatcagaaggttgtgggaaggggaatacctctcttcttccatccctgctccaaaatattctctcatttctgtatttagctgcaaatgaaggaaaacctgagtaagcatggcttttaaaagagggggttgtattttattttctgtctcactcatcaagaagcccaaagcaggcactcagatgtcatccaggacccgttttttctgcattcttgttctcctaacctttgttgcaaggagataggagagataggaggtggtaaagtccaaaggtttaaaggcacaccaacccaggagaccctaataatctttttaggaagctccgcccagtaagtttcatcactttagctgcagaggaatctgggcaggcaagaactgctggggtgtgtgtgtgtgtgtgtgtgtgtgtgcttatgcaaatagattttggagggtgcattctacagtttacaagatcttataaagaatctgcctcccattagagcagtcatcggccaacctccccaacagcacttgggttttcctgttgagagcggggactgagagacaggactagctggatttcctagaccaactaagaatccctaagcctagctgggaaggtgaccgcatatacctttaaacacggggcttgcaacttagctcacacccgaccaatcaggtggtaaagagagctcactaaaatgctaattaggcaaaaacgggaggtaaagaaatagccaatcatctatcgcctgagagcacagcgggagggacaatgatcgggacataaacccgggcatccaagccggcaatggctaccctctttgggtcccttccctttgtatgggagctctgttttcactgtattaaatcttgcaactacaaaaaaaaaaaaaaaaaaaaaaaaaagaatctgcctcccttgtcgggcacggtggctcacgcctgtaatcccaacactttgggaggccgaggtggacggatcacgaggtcaggagattgagaccaccctggctaacacggtgaaaccctgtctctactaaaaatagaaaaaattagctgggcgtggtggcaggtgcctgtagtcccagctactcgggaggctgaggcaggagaatggcgtgaacctgggaggcggagcttgcagtgagccgagatcgcgtcactgcactccagcctgggcgacagagcgagactccgtctcaaaaaaaaaaaaaaaaaaaaaaaaaatttagctaggtgtggtggttggcgcctgtagtcccagctacttgggaggctgaggcagaagaatggcgtgaacctgggaggcggaggttgcagtgagccgagatcgcgtcactgcactccagcctgggcgacagagcgagactccgtctcaaaaaaaaaaaaaaaaaaagaatctgcctcccagctactctcatgctaagcaaaatggcagccttcttggtgtagttaccccatgccttactgcaattctgcagctcaaacccaagagtggggagcaggctagcagccttgtgagggtggctctggagctgcagagggaaggttcagggatccgggcttgctggactctgggtttagacagcttgttgggcaacacggtcagccggcagagagcaggcaggttgacgatgcaggcagagaaggtgagaccgtgcccatcttggggatgggtgacaactgtcctgatgaagaagcccctccgggcttgactcctatttgccattagtagttattttttaaagctgataacgggagtttcatttcttcttatccaggacatttagtgtgtaaaatagctttgccagcttgaaatttctagtattccctcgaataagcttcctcagctcctaggacagaggcttcctcagaagctgtgctgcaacagaccccaatgcctatcacacacccaaagtgtggccagtttggggtgcaaggagacaggagtctgtgagcactgtattcctctgggctttcctgacattggctttgatagtgtctggggtacttcagaataaacgcctggtgggccagaagtttaagaggagcccgggctggggctggcccttaggtggaatggaacaagggttatgcaaaccggattaagcgcccttccgaggatcatggccggcagacactgcaaaccacagatgagcggaagggctgatctttgggcagccaatgtggaattcccctttgtgcaactatggcaccaaatcaggcaatttggattttccttaggggatggacactgtgctctgtaacttctcatatgagaaatttggcttatcagggaccaggacaccaggtgtttgagccttggccacccagaggaccatagttgtttctgctctgtctgcatgactacctaggataactagtgggctcctgagtgtggggcacaaatggattcttttagctccaggactgtccctctggtgcgctttagtttgctccagtctccactggatggctggcacctccaacccaacatatccaagcagggctgggtttgtagataagtgacttctgcagtcacacagggtcccatgactaaaaaagtcctccccttactctgctaccaccatcttgaaattctcaataactgttgagcagggggttccacatttttattttgtactgtcttcccctgccaatttatgtagttgattctgtatctgagagtaaaatcatctctctctggtttcaccttcatccagtgcaccctcgctcagtaaatggaactatcaattaactctagaaatgatttgttggtccctccctcttccttgccaatctatgttcaatctatcaccagaacctccacatttttcttcataaacatttctctaatctactgatttgtctccatttccatcatcaccagcaatgactgtctggttcaagctactatctgttggtagaagagctgaggcaggactggcttgtctgtcataatataaaagagtcttgggagatgtccggggtccagggtctaaaaccgctcgtggcctttggaacaccaagctctgtgccaaagggtagaaggctgccctgctgcaccacaaatctaagcccagggcataaaatccctcgtggcttggatggaatgtgcacagacttgttggttgctctcccaggctcgtaaacatgctctccattatcttgagcagcagagcatattctatatgtgtcaaagaaaatgctaaaccatcacagctatgcttgatgcaccactacctttctacccccacatcctcacgccctcacctgtttacccccacgtcctcaccacctgcttctttgtttgatcaccaataaatagtgtgggctcccagagctcagggcctttgcagcctccataccagtgttggcccactggacccattttatgcacccttaacttgtcttttctcattcctttgactctgctggactttgtagcccccatggcctagtgttgggtctaatcaccccaacactgtctcatctctcctggactccaaaataaatgccaaattgttattctaatatccattctctagaccgttctccacgttgtagcaagagtaattatttccaagcaccaatctgatcatgactctgttgctacttgaacccttccatggcttcccactttccctctcttggtcaaataaggactcatattctaatgttttctataacttcctttatcatctgacactgcctatctcttctgcttcaacttgcggcactcttcactttctacttccctctgcactccagcctcattgactttcttcttcttttttttcaaatgatccgcatgctctctctctctctttttttttttttaaagagacagggtcttgctatgttgcccaggctgtttttgaactcctaggctcaagtaatcctcttgcctcagcctccaagtggctgggcttacattgcaccagccactatgcccagtgatttatcccctctctctcctatcacagggcctttgcacatttagttctcccttcctgctctcctcctgtcttcatccttcagctctcagctcagatgttccttccttaaatgagttcatcattccccagtctaggtcaggccccctgggtgtatcttctcagaacaccttgctcccacccctctgtagtatttatgtcagtttgtaattagacatgtggctatgtgatcatttgattgacctctgtctctcctgtgagactgtgaccacttcgagggcagggcctgtatctgtttttgatgagtgttgtttgctcagtactcagcatggttctgggcacatccaaggttctcactaaatatttgttggctgactgggcggctgagcatgtgcttcctaaactttttgtagtgctacatggctatatgtctgttcttccatctcttataaagtagaagtagagaatggattcatctgaagaaaccactgtccttacaaactatatgcctatacctattatagcttttccagtttttaaaagaattgatctgattactaattagtgctcttccaggcggatgttaactcctccatggctgctggaatgttaaaattctatatggacgtcagaagaagagggggtcttatcaaattcacgtgtcttcttttataaatgggcaaacagaggcctagagaagaagactttcccaggtcctagaggtagttaatggcaaaggtagaatctgaatgcaattctttttcagatcagtacctaattcctttactcatgtaagtatcaaatcactctgggttctctgggcctgcagcaacaattaggggcagctgtctaagatgtgttcggtgtgtgaggttgtggtggtaagaagttgaaagtctgtgacaataagtttccatccattaaacagttatgaatctattttgtactccttgggtaccttaagtttaggaattgggaatgatagtgagggtggcttagatatttttgtcttaggggaagatttctgccttggagtgttttcagacagaatggtgtttctattttgtctctgatccatgagtgtcacagtgttataaagcatagtttggcctgccttcccactgcagtacccctacaggagcaacaccttccagaaaccttataaaagagaggagaggggccaggcgcggtggctcacgcctgtaatcccagcactttgggaggccgagatgggcggatcactaggtcagtagttcaagaccagcctggccaacatggtgaaaccctgtctctactaaaaatacaaaaattagctgggcgtggtgaggctgaggcaggagaatcacttgaatctgggaggctgaggctgcagtgagcagagatcgcgccactgtgctccagcctgggcgacagagcaagactctgtctcaaaaaaaaaaaaaaaaaaaaaaaagaaaaaaaaagaaaaaaaagagagagaggaggaagttgagcactttgctcagaaggacatcatcctgcccattctggtccttacctctaaaacgtgccactgactctcaatcctccccatactccgtgtgttttgtgcattttggatgcacagctgcatcacacatgaagatgcagttgcttcctcccaccctggattcatgctacttccactatgactgtcatttacatgtgcccctcttagctcatagactaagggagaagggaaagggagtgggtgcgagcaactgcgtccagccttgcccccggttccctaagtcagctgttggcgaactatgtggatccaggactcttttacatcttcaaagttatagaggacccccaaagagctttcacttatgtgggttatatatacatatatatgtatatagttatatatacatatatatgtatatagttatatatacatatatatgtatatagttatatatacatatatatgtatatagttatatatacatatatatgtatatgttatatatacatatatatgtatatgttatatatacatatatatgtatatagttatatatacatatatatgtatatagttatatatacatatatgtgtaaacatttatcatattagaaagtaaaactgataaatttttaaaaatacctcctatgacatctttttaaagtcataaacaataataaacccttacatgttaacatggcatttttaaatgagatgtaactattttccaaaccaaaacacatttagtgagaagagtggcagtgttctgcatttttttccaagcatttttaactctctggcttgatagaagcaggatcctcacaactgctcttacatgcggtctgttgtaatatgccgttttagttggagcataagaattttcccctggaaaagggaagacctctcagggtttctcagaccacccttagagaatgaatgctgtaagtgtttcacagaaatctctgggtgaggacaagtaggaggagaatgatcaaagtgtggcctcagaggcaggtgcagaggatgtacccaaagggcacctggcttgggtagacaagggagaagcctactgctgtattctttattcagagtttccaaatagccagggtggtctttcagtttagcagctcctgtgagcctctcacatgtcacggaagctacagtgcctcacaagcggtgtttgtggtttcaagtcaaaacccatgggagttctggggttgatttgccagtgacctgtcattactgtaaaccccttctccaaggggccccaggcctaggactaggttctagaggctgggtgtggtcaaggggcacagagctgttggacaggctctactgcaggcttattttgggctctgctttcttcttctgccttttattctcctctctccctcctctttaattctaaggggcattaaaaaccctgcttagtctttggtaactcttgtgctttctcagtttttagaacaacattgaaaataaaaacagacatttcctagccccactggccagaatttgtccaattaaatcaatatcattggcttgccattctcgtctcatcccatgcagatttgcctggcacacacagtaggtgagctctaagtgctctggtgaacttagaaatcattttataaggagggcacccttttaggaactgggtcagacattgtgtggtcatattaaagctcaatccctggttgcccacctgattgtgggagaccatctatagaaggaggggaaaaagaaactccttttcccagggtgctggactaagaactccagaggccctaagttgtctcgaccttcagatgtagttcaaaatagtttaaggaggcccaacaaggttctgatactcttttgatgattttaaaagtattctttttaagattaaaatacttaaaatacaaggaatactttctaaacagtattattctttcaagtaattaaggagaatctgtttgtaccttggcttttgggtgatctgagactgttcccagcaagaaccttgaattcaggtgcctcaagcagtgggttggatataaattggtatcaggtagtcaactggtttcacgaaagcggctaagggttgtgcacttgagcctctcttatgtggcagaccttatatacctctgacagcaaaggctggaagtgccttccccactttgctcaacccccagccctaccctgggtccaagtgttctgttattggaaaccccaagatgtgctctgtctttgggcttgtctttgcagcagagcatggtggttaagtgtgcgggccctggagtcggactgggtttgcaacccagctctgccctttcccatctgtgtgaccttgggcaagtttctgagcctccctgtgcggcagtatctatatacaattggagatgataattggtgctgtcgtagtgttgcaagggcggaatgagtgactgtacacaatgcttggatgaatacttgacatacagcaagtagccagcccacctgaagtgtagtggttgatgtttttccttgggaatactcagctgctaaaagctaagtatgtctcttcgtggatctgaagacttggaacagaccaatttcaactccaatattctgaggatgttacagggagacagagaagtcagtctcatagtagaaagactgactggctcaggcatttaggaggcctagtttccagccctggaccttctactatgagatcccaaacaagttccttttcatcccttggccttgctttccgcatcaataatccaagggcttgccagagttgtttttctaagaagatttccaaagctaatgcccttaaattttgtgattcccctatctctcctcccagcctgccccttctgttcccctcggcaggagcgagcgaacatgagtggttctgatacatattttccttcctttccaaatccaccaggtcagcacaagaccaggccctgtcagcctcttctagctcatagcttctgcccagccctggaagtgccattctgtaagagaaacaaaaccttttcctccggcagcttttgcgtgtgttcacctgtatttccttctcgcaatcctggcccccagcactttgaggttgcagtttcgttgtgagtcaggcctgctgagagcagtggaaatcagaagagcctccacttggtaggggaggacgtgatgctgccttttcctcaagagcatggccccgggggcggcgggggtgtggaagggaggtggtcaccttccggaagtggatttctcacattgactgtttcagggagaaaagaagattactggaaagccctagaaagcgcttcacatctctttcagaaagaactttgcgttctcaagcaattatctgcaccacgcagtaaaatgtctgtgttgcgttgatgcctgcgcgacgcaggcctatgccgaggaggaagtgttgttggtgtacttggctcctgacgtgggactcagataataaattcccttgagagaggtgaccatgggatcctggattcccgtggcagagcacagtgaggccagtctgggtgctggttcagtcccaggagttgccagctgctacgggctttgaagtattaaagtcccccaatgcctccattgtatcccatgggaaaaggcgagcaggcagggaggaatggccagtgctagaaacaggatatctgacccctgtgaaaaccactgtggatgaatactcgggtcatgcaggctctggatcagcagattcttggatccttgaaggagggtccatgcaggtagacttcaggtagactgaagacccatggaacacaaacatatatataatgcaaaagaacacatacaccacccccaatttagaagtgcctgttttctatggacttgagtggcaaccattggcacttccttaaccgtgcttgtgagaaatcctttacgaaatcaccagcaacttctagagagtcaggaggtcaaatacagtggtgggaaagaagccatgaaaataacactgaaatccctgggtggttctaatcctggaagctgagttcctgtggggctgatctgtgagctgggacaggtggggaggagagtaggtcatctgggagcatgtggttaagcagagcagaaggttagcatttcaatggagggcttacagcccctcagaggggaaagtgcagagggacctccagagagggcagccagggagagggagcagagtgtgacagaagttgacccaagacgacctcgactatttcagatgttgcctgaggctgttcatatgtccagtaggagaaagaagctgtcctttgtaaatctcatagacccccagctcccaagaacctgaactaagtttggtcctatttatagtgtaacccctgctttgtaggctgtgaatgaatcaacatttataagtagagtttctacagagatgttgctccagtttccaaaaaagtgacttacagacatctgtacaaaattggaaagctacctgcaccgaagtgtataaacatatatctggtcaaaggggtcacaggatgtaaactgtgtgttagggaggggtggtgacggggacttggggtggggaagtgaaaggggagggatataggacatccttagagggtatcatgagcaagctggcctcaccaaagctctgccattggaatccagaatcccatgtacatctttaccaaagataccctatcatatctgtaagatggaaaacataatgatacttacctgctggctatgagaaaaaaatgggaaaaatgcttgtcatagtgcacggtttatagcaagcactcaatgacttttacctgacaagccattgcttactctgcaatgactgtaactgtactgagactactacagctactacggccagtactatcacgacagctatgactgttgatatcaccacaatttctctttctcttctgggcttcctgaaatgactgaacatccaaagattggtgcaagtggagggagagttagtgtccccacagtcctttctgtgtgagtgagggttggctggggactacaaggcaaggttcttggtggagtgggaagcaggagcttctggtcactgtgaccatagctggggctgctgtttcatttcaggtaaaatcagagggctttagagtaaacaggaggggaggaggagagactgagttgcagcagcccacgttgagccagaacttgcttctctattggctgcagtggtgggaaaattgaggttgaggctgctattgccactgtaaccaaggtgcgggcctgtggaaatggtgcaagggatgctgagctcttcatattgacctcacccttctccccagtacttcccagcctagctgagctaaaggccacatggaggtttattcagctgtagttactgccatcaacattctgagaacaacaaattaacatgttaaattctgctctccagcccccaagccaccggagaacagaacgcattcttaaagtcttagtttttccaaaccaccaagccaggttcacttttcaaagcactcattttatcagcaaaactccactctcacaaagcccagggctttcagaacacagcccaacctagcttgacatttgcactcccaaatgccttcacagctttccttcccacaggttctctccacaagatctctgaccaaaacacgggggctctcactattgtcagaatatgccctgtgctctcccacgtccttacttccactcatggcttcactggcctgcaatgaccacccttccttttcaccaacagaattctttcaattcagcactgcctcttccatgagccttcctttaacaacctgactccactgagatttcatttttaaaaaaatcctccagtgcttatgaccatccttggcagtactttgtgtaccctgccttagagttgtgagatgtctttgcctgcatggatgcatgtgtgcacatatgcatatgtgtgggtgtattgtgtgtatttcatccctgtggactggacacatgttttatatatgccagagatagagaggagatgcagtctagcttggtgtgaatattttgctcattttgactaaggcacaggtttacgattctcaaatggtaaagacctaggtccgggaaaaggaggcctgggtttcggtctttcttctgtgtgactgtggagatgtcttccaccttcaatgagtcttgatttctgtctctgtgaaatggagagactcctcagttctttctcctgctttacagaggatcaaagagatttgtcaataggttgaaatactttaaagccataaaatagctaaatacatgaaagagcccctctgtggtcttgtctttgactcaagaagggaggctctggtggcttttctcagaaccagcagtaggactaggatccaggagtttctcctctccagccatgccacataccaccaagctacacaatcttttcctgggctgcgttatcctttccactgcaccatgtggtgcagccccatcaggtctcgctttcctttccaccagccacattcatagccatgggaatccgtgtttttcagcaagcttccttctaaaatccccctctgcccagagttcctggggaccctgtggaccttccttccttgtgacatggttggggaaacacactggtctgcagacctcttattcatcttcacgatcccggaggtggcttgagcaatcttatctgttgtgtgagtgtgctcacatgtgtgtgcgtgtgtgactctttgcagctgttctatgactaactgatgccagctatctgatactgtatactgtgtgcccaccatatgctatagactaagacatgtcctgacccaagccctagaccccaagcaaggccaatggcaaactactacctgtcttagttggtttcccctattgctctttgatgtcttactatatacaagacacttcatattgtttcattttaagttttacaacaatctaaagatttgatccaatcattgaatctattttatagtagcgcaaaataaggctcaagtctcctgataatcagttcattcctttacccatatctccatgcagagacaaataatgtgacgctaataattaactttttttttttatctcaagagctttagaggtacaagtgatttttggttacatggatgaactgtacagtggtgaaatctaggattttagtgcgcctcatccaggcctctgacacctcatccccttccctcattgcccctcactgccccaggaccagattagttgaggcagaagcagttggaggtgctagaaaagcattagggttttcaccatctccagaatctgcttagcacatgtctcaacctaaggcagtgcaggcaggatggaggcaagagccttgattccatagcggtttctcttagcacagattccagaaagttgaggatgacatgatagatgacccttgatatctttcttcattcctttttgctaagttattctctgttgtgtggtgcctgtgtgtgtaaggcatttctaggcagaggagctttcctgggtctggtcagttttaccatctcatctgctgatcaagatataaaagatggacagtgtctgttgtttccaccaataatcagataccagtcagaatgctagagtgaccttttccttttccgccttggaaagaaagagattgtttcaaggaacagctgtagggttagatagagaggactgactggaaagtgatttgatgatctgaagtcctggcattccatgaaggttgctctgggcttatagtacagtacgagagatctttgttgaactgaagaagatgctctgaccattagggtcattagacactatggaaccttctcactgaagttccctttttggaaactactaaacattgtacccaacaggtaattttaaatcccttatcccctgcccttctgaggatccagtgaccattataccaccccttatgcctttgtgaatccatagcttagctcccacttgtaagtgagaacatgggtgtttggtttttgattcctgagttatatcacctagaataatggcctccagttccatccaagttgctgcaaaggacattattttatacttttttatggctgagtggtactccatggtgtatatatgccatattttctttttttatgtttcagtagtttttttcgacttttaagctcgggatgcatgtgcaggtttgttacataggtaaccttgtgtcatgggggtttgttgtcttactaataactaatgggtattaagcctagtacccattaattatttttcctgatcctttccctcctcccaccctccaataggcccagtgtatgttgttcccctctatgtgtccatgtgttctcatcaatgagctccgacttacaagtgagaacatgtggcatttggttttctgttcctgtgttagtttgctaaggataatggccttcagctcctttcatgtccctgcaaaggatatgatctcattcttttttcactaatttgttggtggacacttaggttagttccatatctttccaattgtgaattgtgctgcagtaaacatatatgtgcagttagttgtctttttgatatatatagtgacttcttttcctttaagtagatacccagtagtgggattgcaggattgagtggtaaatgtgcttttagttttttgaaaaatctccatactcttttccataaaggttgtactaatatacattcctaccagcagtgtataagcgttcccttttcaccacttccacaccggcatctattgtttcttgactttttaataatggcctttctggctggggtaaggtggtatctcattgtggttcttccaataatttttaaaaggctgaaaaatgtcatcagggcacggtcctctcattgtgccatcctctcagtatcccagaaaaaaaactgagccccatggcacgttctgtttctgtctctgattgtggcctgcttatggtcattccttccccgtctactgcaggggaaggaaaatacccagcacctcccaggtagaaaaagagggaaaaaatgtaaaatgtaaaaacccaagctcggcaactatagaagataaacaacgttgagtctcagtatggttcatcggcagaattttccccagagccaacggcctgtgtcagagctatattttccactccggctactgtgatttggttgtggcactcttggtttctttcattttggtggagacagactctgacgcaagtttaaggctctggcaggtgtctgggggtttacgaacttgtccgggcctctgacacctcatccccttcccccattgccccccactgcccaggaccagattagcggaggcagaagcagttagaggtgctggaaagttgttagggttttcaccatctccagaatctgcttagcacatgcctcaacctaaggcagtgcaggcaggacgcaggcaagagcctcaattccataggggtttcttttagcacagattccagaaagttgaggatgacatgatagatgacctttgatatctttcttcattcttttttgctaagttattctctgttgtgtggtgcctgtgtgtgtaaggcatttctaggcagaggggctttcccacatctggtcagttttaccacctcatttgctgatcaagatacgaagatggaccgtgtatgttgtatccaccaataaacagataccagtcagaatgccagagtgaacttttccttttccttcttggtaagaaagagattgtttcaagggacaactgtagagttagacagagaggactaattggaaagtcatttgttcattatcaggatggagctgggcaaattcccagcagctctgctgctgggtatgaccaggaggtccttaggtttttttttttttttttttagatggagtttcggtcttgttgaccaggctggagtacaatggcatgatcttggctcactgcaacctccacctcctgggttcaagcggttcttctgcctcagcctcctgagaagctgggatcacaggcgccggccatcatgcccagctaatttttgtatttttagtagagatggggtttcaccatgttggccaggctggtctcgaactcctggcctcaagtgatctgcccgccttggcctcccaaagtgctgggattacaggcatgagccaccatgcccagtccctatgttttgactttggctgtctgcacactgtgctcagtcccaaagcttcctgtgccccatgcccagccccagtggcctctcactagcgttttggctttcaaagcctcagtgtggtttccttcaccaaaacttcaccctcatcagaggctcctttctcctccccctgtaaaagccccgttttcttaaaggtaactggccaactgaacacttttaaaaataggttgtaactgcacctctcaccatcccagaaaaagacttgtagttttcactggtaatatcccagacagggtgtctaagtaaattggaatgttcctggtcctgtgcatgtgtgtgtgtgtgtgcatttaactgtgggtggggaggccctgggtcttcccaggctggttggatttatcatctcttctgcctttcccaacatttaagatgggcagtgccactcacgggcagatgcccacttctctggaattgccccatcctggtaatatttgtggcttctgaaggctgagtctgagatgccttctcttggttccaagattctgagaaagcctggggaacagcataaaaattccaccctggaaatagtatacaagcaaaccaactgcccacccacttcctgagtgaacattgctgagtgttcctgagtcaggggcagacctaaattccttaaccatctttttcttccctttcccaacctggcacggcctcatacccctctgcccctccattaaaggctgtatttatgagcagtgatggatgctccctgacagggccaccctagaaaaaattgtgtaatgacaaaaacatgatgctctgattgaccctttgtggtttagtacattcacaatccccccaccccgcctttttttttctgagatggagtcttgctctgtcgcacatgctggggtggaattgcatgatcttggctcactgcaaactccgcttcctgggttcaagtgattctcctgcctcagcctcccgagtagctgggattagaggtgcatgccaccacgcccagctaatttttgtatttttagtagagacagggtttcaccatgttggccaggatggtctcgatctcctgacctcatgatccacccgcctcagcctcctaaagtgctgggattacggaagtgagccactatgcctggctagatgtatgtacctctcttaagcccatcttataggtgaggaatctgagttcagagaggtaatgtgcccaatccaagcctacacagctgataagtgtcagaaccaggattgaatcctgggcagtgtggctgcagaggccacactctgctgtcccttaacagagctatggggaactaattggcatataattagctgaaatgaagtacttcgtggtgcctggcacaaaggtaccacaataaatattagttcccttgccccaagaatggtttgcattttaatgactgtggaatgaagggctttcaggatccattagagttagaaggatttgcatctgagtgcatgaatgcgcttgtgggacacccacgcaagccactgacaatcctcagggttggtcagccccatcctcagaggtttatacctggagctaaatcccgacggggacttctgccgatgacttttatagcttctgacatttcagtctcttcatctcagggagctggttctctgaggactttgggggtaacagttttaaaaataatgtaaggcagctggtgatggctgctttaggggcagcacgtgagctgggccccaggaggggaaagccatgaatcaggggtcatgtagcaagacagggctttcctacgggctggatttggtcagcatgggcccctggttcccttgagggattccccgactgtgcggcctggcagtcgtgctctgatcgaatgcctccgattcccccagccggcctgactcaccctgcatcgctcagacctctgtcaaggtgctgctcggagagtcaaagaggctgcagcaggcaatccccttgcccactgcaaggctggttgggaggctgaacaaaatggcacatcctctcaagtccagaaaggttgggccttcctttcaccctccattttatgcctggaacctcaaacaacagaaaaaaacacgaggcagaaaaaaataattataataattattaatgctttctgaacctctaacgccactcgattagtcacagtcatagttcgagtgcttgttatgataacacctcggtggcttccttaactgttggtagtgattaatggcatcatctggtcgaagggctagggaggagtgtgcctgttgacaagaaagaggggctgagtagcaggggaaggagagtggggacagggaggtgtgggtggaagcctgggctaaggctagcgttacagcacctgagtcaagagggcagatccctaagttagagaccaccacttaatgttccaaagacatctagggactcctgggtcatggctcttcaggtggtggatgggcaatgttctctagtaccttggacaccatggccaggccaatctcatttcatcaccatcaccttcaagttattccccagtttggtcattgggagagacttctcattggccaccagaacaactctaaattcatatgaacctttcagtttccccacctgcaacttggaaataaagatactgctgctcttattgggaggataaaatgaaataacagatggaaagttcctggcacggcatacagtaggcactcaatgcgtggtggtttatttcactctatttctgtctacggtccgtcacatcttacacttcattgtctgtcacctgttccatgactcctgccctgcctcccacacattcactgattcccatgaccccgtgtccctcctttgtgaagcctcttcccactgttccagctcacgtcgacaccccctctctgagctcttatactatggttggccccgggtcctcctgttgggtcctccctacttgtagcatgggtgtaagtttcatcttctcacgtagattttagcttctcaagttcaggaactgggctcattgcttcttttgattctcatgcctgacaagtcacaaggtgagcaataggttctttagaagagacctgcgaggtgggtaggggtgggtgtgtggcaatggaaagttacccaaagtaatggggaaaccatctggggcacttctgtttggggatttccctggaccacattttgtgacctgtaccaagcccggtgctttgtcaagctggaatcctgctatgctccccactttccatacctatttctgcccatggcactcatgtgaattggcaaaagtgctgtgggatggaaaatattggaatctcagggaaaagggtcagtgagtgcatccttcagggcaggatgtggggtcccaaaactgctttgtgcctggcagatcacccaaacacttcctccatttccccatgccagctaaagcaaccttggctgttatgctctggcccaggtgtctttcagggcctttcattctccacacaaaaagcttaggcataggggccagtctagatccagacacaagggccagctggagaattgggaagtacagtaacacctggccaccaaggctggtacagttcagcctgacaacagtctgagggcagtagtctgttgtgaaaggggacagatatgtcaccttgaagctgcagcacttttctagaccaagcccaccttcttgaacatttcagtctctttgcatccagctgggtgtattctgtcatatacacaagttgcctttggctctgaggctgctttataagaactagtcctggatggtgtttggtcagggatgaggtttgagtttgctcagcccaagcaggtatgcttaaattactctcagattggatgcctcaagagcctggcctactcctctcctactgaccatctgttttctactcaacccaagccaactcaccatttgactccttcccacacctttaggattgtgaactgtagaatgctggagttggaaggagctgtagagactagctagtctaccttcttcctcattctatggatgggcagacagacccaagacttggggcgatttgctatgagcttcttacagcctctgcatactacacatggataactgtttaccttcctgctcctggatcagagcctgccctcaagttatcccccatagcccactcttgttccatcagttgtgtctgaatcaaagactcccttctttttattccttctattaacagccttaaaactcaccttccccaagaagaagccttctttgattaattcagttcatttttgtatgaggattttccagagaaacagaaccaatataaatatatatatgtgtgtgtgtgtgtgtgtgtgtgtgtgtgtgtatgatttattataaggtataaggtatggctcacatgattatggaggctgagaagccccatgatcacctgtctgcagctggagacccaggaaagccgatggtatagttcgaaggccagttggagagtcccatggtctagattctagttcaggtctgaaggcctaagaaccagaagctcccaggcaggagaagatggatgtttcagtccaagcagtcaggcagaaaaggggaattctcctttcccctacttttttgttctactgttacgctttgtagatcagaccatgcccacttacactggcaggggcaatctgcttcactcggtccacaacttcaaatgctaatctcttccagaaacattctcacaggcacacccagaaatcatgcttaaccagacatctggaaatcctgtgattcagtcaggttgaccataaattagccatcacaatcctccattctttacgaggctggtggcttgtactatgttaattttcacttaccattgtttttcccccatgagttcctgtaggattacagccatacaccaagtaatggtgtctgtcaataatggaccacatatatgatggtggtctcataagattatgatgctgtattttactataccttttctatgtttagatatgtttagatacacaaataacctaccatcatgttacaattgtctgcaatattcagtacagcatcatgctgtacaggtttgtagcctaggagcaataggccttactgtatggcctatcttattgtgtaaatacactctatgatgtttgcacaatgacaaaacctcctaataaggcatctcccagaacatatccccaccgttaagtgacacatgactgtattttaatgtgttctatatcaccttcattagtctggcagcttcctccaccattctgggaggcccagacagtaatggctgtcttgtgatctttgtctggattctcaccctttgtccagcccaggactacagactcagggatgttcacagcccagtaaatgggaagtattgctcgaaaaccggatcacaaagcctccttgtgctgaggctggggtaagacttggaggaagaagaaccttccctgactccttcgctggggtcagcctctaagggtcagggctcactccctgcagtgtagagactttgctgcgggacaggatgtgaacatccttggcttttgcatggtcaagttaagtcacttgtccggggtcatagtgacacaatcattgccaaacctgttcatttcaccagggccccatgggattttgccaagtcagtcctcctttgtactttcttgctcaactggtgtagaattctcaggcaggaagggaattcatggcggagggtggggtgaggtggaggtcatgtcgtacatcctcctaagcagacacatggacgtcagaggcaccagagggtttccacattgacctgcagtcacccatttacacatcccccacctccgagagttcaggtattcttgcaaatgtctccatttctgctactgtagcttatcctgagccctttactgtttttcctggaaaacaagaaaatgtttgggaatttgtatattgggaatgggcaggtgtctacattcatttgctttaaaaaattatttgaaacattgccctttaaatggaaaaatcattttcctgatcttttttctcaaggacatttcctgctgcctcctccagacctactcttatcactcacaaaccctagaggttccgtggccaaaggaggacagcagctggccatttcagactatgtccccacagggatcaggactccctgggacatgatgggagtctggagaaggtgtcgtggttggcaggaagtgccacattcagggatattgacttctggctctttctccacgtgactatgagatgaagcaatttctgaagagggttaagataaaaaccttagatgtcatccaacctaatccctgattttacaggcagaagaagtggatttcagagctagctagtggcagagccgtgactcacaggccacagacctcctgacaggcagtcctttctcagagagcccagcaccttctgtgtttggttgtgttgaggtggagttgaaggaggaagcatggcacacctgctgtaggtcatggggacagatgacattccccagacctcttgctgcctagttcctcttttaattttttttgagatggggtctcactatattgcccaggctggagtgcaatggctcttcattcataggtgcgatcatagtgcactgcagctgcctagttcacattcttcacctggcccgttgttccatccagtcttgacctcgctagcctgcagggggcgtgtgcaagcccacactacagcccaggcatcccctctgcaagggaagtggtgctgttgtggacctgcagtccttggggggcttcaatttgtatagaaatgacaaggacagagcaaaggaaagtgggatttaattttaagcgcccaccttcccacccccaagtcaatttcctgtgacgctaataaaagcttcaggatctcttactttcattagtcctttccacagccaaagtaattatatacacatttttttttcttaaaagacagttctccctcccattatatatgcctctgggccccataaaatctggccaccctcttccccgacccgatttaccaaatgtcagagtcccacagcgcaccgagaaacaccactgtcctcctggagctctcccacacaatacaggccttgactgagggtgtgattcggttcagagtagctgggttgaatttttgtaaagaggttgccgtgtgtgcacttttgccgacctcaaagccaccagaaggagggagctgagtgtacctttttgtaatgatgactctctatgattttctccatagagcggtgcttgcacacactgacaggagtccaagaatgtgcactgagggagcgtttccgcacagatctgcgtgttccttaccactcacacatgtgcacacacatatccatgtgtgtgtgccagtgctttggggctctgttccacggggtaagtaatttctgctatagggaccctggatgtggagccattctctgggaccagagatatccagtttatttcaagactctggaagactgggttttcagacacctatgaactgacaggactgcctttgtctgtcataaagttccttattgccagactgctggccaggtttaggggagaagggggggtcaccatactggagatgctgagggtgagtgagggagtgtagggtggaaaggcagacaaataaaccatatctgcataccccttccccatcagctcccatactggtcatggcccatttcttcacacaacaagagtcttcaccaaggttgctagctgcaatggtacagtccagctagctgcagcaaaaagggggaatttactgtaaggagcctggggtgtctcagaatatccatgggatggaagctgctgcacgacacagagggactggaaccaggagcagaagtcatcagaaagccagaactcagcttctcgctctctgaggccacgtagtcactcctttctgcttttcttggcagctttctctgcatctctgagcagtttgcagaggactgcaactgcacagctctagaggctaccagtctttaattcaagggaccagccaagactgactagtgctctaaagtcccaagaccaaattactgggagacagagactaacagaacagcttaggtcagttgtccactttccaatcagctatagccaggagaccagggtcacatggctgcctgtggaccaaggtcagggtggaaaacatcatcaatggtgtcccaagttaaatggcttgtcctctgtgaagaccctctgatcaatcctatggaggaagtgacctctctcctgaatacccacagcactttctcttcttgacatgtattgctttctatcttgtgtactattatttttacaaacatctcatcccctctcccacttatctataagcaagtttgtttatctccatatatttcacagcttgcacaaaaaaagatatatttaataattatccaaagtcattgataatcttcagataaatcaattttcaggaacttaagcaacttggccaagtgtttcatttcactgaattgtccaggcttgattaaatgcaattaattcaaccaatttttattgagtgccttctacacaccagactgctgaggacacaacactgaacaagacaaagtccataccccattgagcttccagtgtagtggtgaagaccatcaatcagtcaacaccgtttcctctaaactaggctttcagctgggtgccaaggatagaaatgtgtaagtctccagcattgccctggaggagttgtctccctggggcagggcagtggtggtggggtaggggggaaggtcacagatgaatgctccgatatgttgctgtgcaacatgacagtattattagttaagggttggggaggaagtgccgtaagaccccaaagagagagtgatttaccacctggaggaggagggtgtggtcaagggaggttttgctaagaacagtgacacatgactgaacttgaagggtgaataggagtttgccagggagagtgggagttgagtatgtgagtgtgcatgtgtttaggaaaccgggatggggaaaggagacaggaatgatggtgatcaagcccttccagatgaagtcatttatctggaaaaagattttaggcattgtgaaagagctgctgtgtctggaggaaggtgagacatttagtatatctggaacacaaaaaatatggggaaaagaatggggagattggccctggcccctcctggccgtgtgtgttaagtccgggaggcagtgggtaagtagccactgccaattgccttggggtctggaaggcaatgatgttggctgggcatgaggaccaggcacagcctggagaccaaccacctctggccagaaacatattccagaaggccttaggatgagacattactcctgcctgtggtcgttgacctctggcttatggagcgagatggctgcatgctgagattctggtgaaatttgtcactcccaaattgcaaccttcctcagaaagcactggatcttctaactttcactctctccctagtagagtgggattttctaaattttgcaattgaatttaagaaatcaaagaaagttgtccattcgtagtttaaaaaaaaaaaaaaaccacagatgtctgcctccagacccctgtgtcctttgaattacaagcctgtagcccatggccttctagccaatgatatgagtgggactagagatgagggatttccatggactgctcctgctctggaatgttccttggagatgacagatctgctctccactgtcctcatgtgcctggaggcggggggtggaatggaggcaacttcctggacctttccctggccagactcaaggccattggcacctggtccttgtctctttccagctctgtctctgtgccctccccattcctggtcagcctccagcactgttggcccaactgcctatctcagacctctatggctctgggtcagtcttagacaaactactccctcttctctccctgtcaagcatcacttatccttccggtcaaagttctgtgtctctataaaggcttctccatcccacctgagtcagacccaagagctccctcttctgtgctgtcccagcacttttgagtcacttctattattacccccacttccttggaggacagttatctgttcttatgttcatattgttcttatgttcttaagtagactgaatttcttggggactagaccttaatcatctctatatccctggtcatgagcaacagtgcctgacacatcacagactcacaatacatactctgtttgtcaatgaagggtgattacctgggtatcttgactgttgggattgaggtaggatgaaggcagctttgggaagaactccagtgagcagaaaaagggaagggacatttgggtggaagaaacagtttgaacgaaggcacctccatagaaaggcatggacaaacatgggagcttgcaggaaaggaggggaaggggaggctgcagcacagggggctcccagcatggtcctgggctccttgtgtgcatcagtgaatgcaccaggcctttgcagaaacttgatgtattggcactgatccatagagaagggaacagaggcccaggaaggaaggtcacacagcttatgagttggtgatggagatgggattagaccattccattagactttaaaacacatggcttattggggccctagagaacacctagtaattcaggttgcctggtgcctacagtaagtcagtaggttgtgagaggaaaggtgtacatgacagaattatattattcataatatctgggtggtttttttttctgccttccatgtaccaaaacctgggctaagcatttttatatattacctcatcaaaacgaacagcacctttatcaagcgattacccctattttacagataaggaaactaaatgtcagagagttcaataattttcccaagatcacgaagccaataagtgatggagtcatgacttaaattcaggtcttttggtgacacaacccagactaattgggaaagagcttcatgggtaaatcgtgagtcatacttaatttcaattcctggtgacataatgagggtacaaattttcaattttttttttcttttttttttgccatgggcaagttccaagcctgggcttctcttccaacactgtccctcccttccctgtatagttctgctcacttgtcctgtcttcttgctctgtcctctatgcccacatgtatagaactggatccccaatcaaggctaactgctagccttaaagaaagaccaatcttctggcagataagaaggactgttaaggaagacgaggggacaggaaagcaaggggaatgtcaaagaaataaggggcctggccaatatctcaagaacagaagcagctgtggccctggaagggcgagggggacgtcatttccttttccagatcccttttttcctttgaggttcagtcccaaatgggtaaagttcaaatactagtcttactcagaattccctagtcctgcttgctcaaaaggtggattttctggcctcactccaatcttcaaaacatctttttgtggggcttgagagtctgccttttaaaatagcaccccagagagtctacacattgagggccttggcttctgtaatgcagttacatccatgggctttcgctgttgctgctgagagaacttggggtgccaggaagtcggggttggatgccttccagttccctgccctaatcagaggcattgacctggaggccctgtgtaggagtccccatctttcggaattagtgatgtggttagagtagcaacgtgactctctgtggacggaagaaggtaggtcggatgtgagagtctccctccatgaacatgtgtgcgtcatctgagtcaaagcttgtatctttactctcaaaaacaagtcatttttgttcctgtcagcatcttggccagcccacaacaaagagtacaagctggatgcttgtactgtgctgcgataaagaggcccagacacaggcctcaggtgatcctacagagcatggctggagagaacaggaaaggattattcccctgggggctgatggggctgccttcagcaacacaaaaacatgcttacagaaaactgctggaggacataggagtgatctgcttgcaatgaggtttttcaaccaccaggaatggggtgacctagtccagagccctctaataaagtgactttcaaactgactgcacttcaaaataatcctaagctttaacaaatagagatgcccaggcttcatcccagatgtacaaaattcaactctcagggacagggtctgggactctgtgcaaagccccctgggaattctggaacaactaatctggcattgctctaggaaatagcacttggaaagcactccagcaaggtgggagggaaaattattccagcttgaacactacaatatcaagtaatcctttctctcttcgccctgtctcttcccttccctttcttgctctctgtaacaggcaggaggctcagaagagcttcttctctcacgcttcttgcagggcagtacagggaaagatgtagctgtgtaaattccaggagggcttcaggtatatttaaatatgggttgcttgccacattcacctgcctatcaagtttgcagatgacaactgcagaatgtggcacccaggtcttgaaagtcatgaagcagaattggataacatctgtccgagtcatgacaaagagggttcctgtgctgggagtgggggctaatgaacctggagatcctttccaacacagacattccctgatgccaatgataaccttttcaaattgttgttttcttgatttttatctgtttctggcacctcatttgattccctatatgacaataacccccaggttgagtgcactgaaataatttaggtaatgagaagctgaaagttactacagatggaaggaattagggtgtataaagtgtgcattgtgtgagtcataggctgtgtctttaagcaacaagcttttattggtgtcagcatctttccaggtacaatgcaaacccagtgagaatgagatttggggtttaaaagtgtttctgaccagagatgcctgagggaatgacccagggatcaaacagagatgcaagagagcaaggcttcaaggaaactcacctcagcctgtttcctcaactgctttccgcacctttgtttgcgggtggaagaatagaaaatgggcttgaatttttcaatctaaaattctctgttcaaacctgaaattctcttaccttataggaagagcagctgtatctttcaaggatagaatgggtgctaactgcatgggtgaaattatctgaatcccagagaaatgctctttagaagaatccaccagactccttcctttctaaatcatacccttctttgaagttcctttcaatccttggatcctctgtggacactgttctgatcattcaagcactaaatgatcacctgctacctgctgtctgcatacctggctctgcttctagagtacacacctgtatcggcacaatttatttagctattagtcatgtatgtgtttctgatagctctcagttagctgcctgggatggttatttacctttttgtgctagttttaccttctcaatgggactttgagcaaattaagagtgaaaacacatctgtactgatccgtttacatgtccaataaatagattttagtgccaacttgtgcagccattgctctaggtcttgatacagatatataccaggtggtagaggctataaagacaaagcaggctaaggggagttaagtgatagattcaggaaaatcattgagctgaaaaatgaataataacctcattcacttttttctgtttatcaaagaatgccatatgctagatgctaaaacaatttacatctgtgtgactagagcaagccattataaaaaggaaacaatccaaatggaagaaatattttatcaggctggaaaacacagttattgaattaaactccaaaatggaagccatagcttacaaatggacactgcagaaaactgaattaatgagtaaaaggcaaactgaagataaatttcctagaacacaaaagcaaaagataaagaaatgaaaatgaaagaatagagtaaacgtgaaatacagatatcaaagagctaacctacacataacaggagttcctaaagataatgaacagattcttttggagcagaagccatatgtagaaaatataatggctttaagtaaaatcttattttaaaaactgaatgcgcttactgtattcatcaggagtctggatcgtgtcaggctcagttcaaaccagcttaaacaaaaaaggaattttgctggctcacttaatgaagtccaagggttcactaggaatccatccctgctgctcttgcttttttctgggttgccatcattcttgggagggttgttcctgtagggtgacattcagtatctccagactcacattctcccagtttaccaatcccagtggaaaagagagttctaatacatgtaccattaaccttgggttaatcctcgttgattttgattggcttggcttgggtcatgtactcacccttgaatcaatctatgcaattgagaagcgttgttgccttaatttcaccggcagcacacacccactcctgggatgagaggatgggtcagctttacctagagtcatatggactgcaaataagggaaatatcatttcccagaggaaaatggggttgctactttcagaagaaagggggatgaatgctaggtaggctaaataacatcacattggcagatagaaaagagctactactctgaaatatattcaggtagaacttttacatctaaaatactacaaaaactcaataaataaataggcagggagaaaacaagtcaagcatttttcagatttattttccataactctaaatgtgagaagacaatgaaacaaagtattttaatctgtgaaggaaagaagttgtgtgacctgagaattctatgcctaggtaaattgtcactcataacgtatgcactcggaaaatacaattcccggaactctccctgagcaagccagtaaaaaatgtatcacaataaggataaattagagttggtacaaattatcacccagtcctatcattctacctctgaaatatattacgatttggtcccctttccactatcaatctggtatcgtgttagtccaagtcaatatcatattttatccggaccactgtcacagcctattaagttgcctgtctcttccactctcaacccttctaagccattttgtacatgtcatccaatggtctagtaaaccagatcatgtcacttccttgcttaaaataattttaaagcttcttatgggtattagttcgttctcccactgctataaaaacatacccaagactgggtaatttataaaggaaagaggtttaatggactcacagtcctgcagggctggggaggcctcaggaaacttacaatcatggcataagtggaagcaaacatgtccttcttcatatggtggcaggaagaagtgctgagcaaagagggaaaagccccttacaaaaccagcagatctcatgagaactcacccactattacgagaacagcagcatgggggtaactgctcccataattgaattacctcccaccaggtccctcccatgacatgtgggaattatgggaactacaattcaagatgagatttgggtggagatacagccaaaccatatcctatggcatgtagagtcaactcaagttccttactatgaccttcaagaccttgcctgattccacctctgcagttattcccagcccagccacactatcctctactcaccatgctatagtcatatagccactgatcagttcttgctgtgcacatgctaagctccttcttctctcagggccttcactcatgctgttccctcaacctggaactctctcccctcaaccctttcttttcctggctccttctttctcattacatctcagcttacttatatcacctcttcagatgttctctggtctcaaaatctgaaaataagtttcctttgtttttttggcacccttatttcagaccactaatcacaaattgtagctatatatttatgtgtttagttgtgttacatttgtcttctcttagagtatgaaccccacaaaagcagggaccatgtttattttatttgtcactgaattcccaggtcttagcactgtgtatgacaaagaaatggtgtgcaatttatatttgtaggaggaaggcaaaaagaaacattgaaatggtgtaactatatatagaagcaaatatatagaaagaagttatgggaattgatttaactataatttctaaggtgatggtaaactttttttctattaaagagatgaactatgatgttaaaaaatggagcagaaagcatatttaaaacagtaaataaacacattcattatatagtgcttttggttcctaatttggtgccataaaaattgatataggccaggtgtggcagctcatgcctgtaatcccaacactttgggaggctgaggcaggcagatcacttgaggccaggagttcaagaccagcctggccaacatggcgaaaccctgtctctactaaaaatacaaaaattagccaggtgtggtgatatatgcctgtaatcccagctactctggtggctgaggcacgaaaatcacttgaaccctgaaggcggagttgcggtgagccaagattgcactactgcactccagcctgagaaacagagcgagactccatctaaacaaaaataaacaacaacaaaaaacaaaccataccaaacaaaagatattgactgatgtgatgtgaagctctgagagtagaattaaccgtgcatgtagagtgactgtggccttgaaggaaggatagaattcagaaaattagggagaggtatgaagggaattgtgtgtgtgcgtgtgtgtgtgtgtgtgtgtgtgtgcccatgtgcacgcatggtggggtgaggtaggaaaaaactaggtgagcagagatctggcactgagacagagtaaatggagtgaggtgggagggtgaggagcccctaagacttccaggtacaagaaaactcgcggtaggttaaactcacagagggtagtgtagaaagtgttgccatgaggacaaagcatccaccttagaggggcttgttgctatgtatgtgtgcctgcagttgacacaagtcttagcaggagtcctaagaaaaggctcccagcccatttggtctgtggacaataaggaccccttgtggtgcaacaaagaaggtgagagacagatgtagtgaagaggctgcaggggctagagatgctggccaggaaaggacagcctgggtgggacatcatgagtgaagagggtgcatgaggattctgtatgacagagaaggaaggcagaaggttctggaaacaaacttgtactactccccatgaactcaaaagcaggtcttgtttagggagagagagcaaagctgctctctgttcttggcaaacagtctttgtatatgttgatcatgatgtccctcaaagcagcccccatgggtgttgcccccactgcttcacctaggagctgtgaagagtggtagatacagcattcctaggcagcagacctgggctggaatacctgtctctgctatttgctatctgtgtaaacccaagctggttcattatcttaagactgctctcatctgaaaggaagggataataatgcatgatttccacatacctatgtgagatctccacatgtgataggctttttagtctgtactgttagttgtacttggtgtggggtgggtgggcatgaacttcagaagatgctgtctgtgggcctgacctccactggcttttcctgcaggtcttcactttagctcagcttcaagggaagactctgttggccaactgggtagaatatttctctgcccagcccacagttctggtagggacttcaaaagatgattttatactgcaccattgtagactgaaaaagtaccataccaacctctgggcatctaactagttttaggaaaaccaccagaaaaggtgaatctgccctcttgatctactgtaagtagcatgtaaagtataaggcgggttgtgcaattggcactagatggcactgtagcagcctgggtgcattagatgagacctgcttcaaacaagaaatatagtagctgggaggtggggttgggcccaggataatgataaggacaaatttccattaaatgacttgcaagatactgtccttcatttataatgagtctgacaggaacttccccagattcatcagtagattgcatgttgcagctcagcaatcaccaccaggtgtggaatcaaccatcccaaccacgtttgtgaaaaaccttataacaacttcacttggggcagtttccttcaagggaatgaattctccttctcaagacccatcccaacctctctttattgccacttgcctcaccattagggtcggatctcacccttctttgggggttggagggcatggacaaagtccgactcagaatagtttatacactaaaagaagtgcaagactttactaataaatactggcagaatcttgggaaatatgtgtgagaatagattctaagggtgttagaccaaggaggatagactatagcactggattggattgaatttattgggggtatttatgagacattctgggtttagtgagctagctcttgtaactggaagtggctctaaaatttcttggttggctgactaaaccttggactcaatggtggcatatgttcaataaggctggaatgccagaacttccctgacacaatgtagaggaaggcatccaagacttaaggaggaaggaatgatggagtgactttatcacatgaaatctctacatctaccagcctcacatccatcccccagaatgcctagaggacaatcctttcataaagacattaagaaacacattgacgaaggtagcacttgcatctctgaaaagctctgtggtggctgtcttctataagccaggtatgatggtgaaagacacctccattgagttgaatctctgattttaatagaaatgatgagactcccatatagcagaggccaaatgctataatttaaccattagagacaaggggactgcaaatactgacatagtttggatgcctgtcccctccaaatctcatgctgaaatgtgatccccaatgctggagttggaggtggggcctactgggaagtgtttgggtcagggggacagatccttcatgaatggcttggtgccctcctcagagtaacgagtgagttctcactctatttgttcacctgagagctagttgtttaaaagagcatggcatctctcttgcttcctatctcaccatgtaacatgccccctttgctttccaccatgattggattcttcctggatccctcaccagaagcagatgccagtgcaatgcttcttgcacagtctgcagaactgcgagccaaaataaacctcttttctttataaagtatccagcctcaggtattcctgtatagaaatgcaaaatagactaagataaataccataaaaaacagaaagggcatagtgataatcaaactgttttgaaacctagagatttttagtgaggcgaattgatcatggtgcatctaggaatgaaaaagatggccagctactaaaatgtcatctgaactatataaaaagtttggtgacccccacctctactaaaaatacaaaaaaattagccaggtgtggtggcaggaaactgtagtcccagctactcaggaggctgaggcgggagaatggcgagaacccaggaggtggagcttgtagtgagccgagatctcgccactgcactccagcctgggtgacagagcaagactccgtctcaaaaaaaaaaaaaaaaaaaaagtttggtgaccaaaaacttgagctgcctttcattctatttccagacctaggccagttccagacttagaatctcttgattgaaggtggacaaatgacgcatcctgtggatttcagttaatatctttctccagctattcttgtgcttgctcaatggccctgagcataaagtggccataatgtcagggatgaggactatgcatggatttaacaacatggacttaccctagtcaaggcttttttgaataccaacactgctgaattcctagcttgccaactaaagtaagcctctgttatggtacaactccctaaaagtcccagccagcccccaggggcagattgattacagtgcaacccttccatcatggagggaaggaaaaatgtttccttagtgcaggagatatgaattctgagtgcagatttgctttcctgtccaaaaatcttctggcagctgtgactacaaaatatggtgtactgcatacaacatttcttctgatcaagaaagtaatttcaaaagaactgcagcaatgggtttatgcccatggaattaactggtacaaccacatatgctaatccccagaagcagatggcttaatagaaagatttgatggtctactgaagattcagttatggtaccagttgggagattacagtctgaagggatggggttctacattacaggatgtagattatactttgaatcacagaaccaactatatggttccatatttcctgtagccagactacacaggtctgcgaatcaggggtggaagagggactagctcttcacactctcacatctcatagcctactcacagaatttttgcttttcatccctgtgcctttgaactctgttggtttggagtcttggttcctaaggaacaaatgtctctaccaggaaatacatcaatgtcccattggtttggaagatgagactaccatttggccatttggggatcctcatgatgccaaaccaacaggctaagaagaaggttactctatgactggggcgactgattaccaaagtgaaattggattgctgccactccatgggcccaaagaggacaatatctggaacccagtgggattttctggggtgccttttaggattttcatgtccaatagtaaaagttaatggaagatgaccacttccccagcccctggctaaaggcataaccactgatgattcagacccttcaggccagatggattaccccaccacataaaaaaccccaaccgtgtgaggtgctggatgaaggcaaaggaaacataaaataggcagtggaagaaggaagttataaatataattatggcctcatgactagttagttgcttactgtgtgtatttgtatatattaattattttattctttcttcttattcatatcattttatacaggttttgttggaagttaactttgcaatttggtttttagaaaacatattcagatgggactgtgactgaatttgagaagtaattcaaacggatacaatgacttgagactttataatcctgaatttggggagaaggtgatgctcgcctgttttatatgctgaatagttgcattttgttgggaggaaatgaattgttttgtggttgtataaaagttcaaatttttgtggagcagtgtaatggatgctaaatagccaaaggggtggactgtatcagttattgcctctcagttctaaacccaaccttctatagtctgctttgtgatcctagagaccggaccctaaaaaccacatttctgcattgccagttggctctgccaataggggcactagctggagacttcaaagctggaggcagaaaaaggggttttctccttcctatatgcttcctgagggtttcccgtctgcttgtggttcctgtgagtgttaccccagagaagctccttcatcataactttttttttcccttgtagcagcagctaaatctagttttcagtttttctgacttgcagaatcagcttcagcatgtgtcccttggggacaccagcaatagccagccagtgtctcttctgcagagatttggatcctaataccctggatccctccctgtgaactaagacaacaagcactggccaagcaatgcctcttacagatctgagtttcagttccttggggcttctctactgtttctaatttttaataattttaaccttttctctttgcctcttggctctcagcagttgcaacctttatgatattttagagttctcttttaactttttttagttactgtggttgttagttttatatatcagtttggcttggctgtagtacctagttatttaattaagcactaatcaggtattgttgtgaaggtatgttgcagagctacactaaattgactttaagtaaaggagatggccctcaatagggtgggcgggcctcattcaatcagttgaatgacctgaagagcaaaaactgaggtttcctggaggaagaagaaattctcaagactgcaaattagctcttgcgtgacagtttccagcctgccaatctgccctacaggtttcaggcttgctagcccccatggttgtatcagttaatttcttgaaataaatctttttatatatagtaagagatgctggttctgtttttctgaagatccctggctgatatagttatctagttagtatctttgtacctatttgcatatatttaaaaaactgttgtggtttccatctcctgattgaactctaactgattcaagcaatgcacaattggaagttttcaataaagactcctatactaagtgtaagtttgaacggcaattatgagcacagattgcagccagtaaatattaatagaacattgcttaggcagagaatatgccaaacccaagtatgtagcttagaagagcagcaagagaaaatggttaacacatagagcaggtaaacagcattctgcagaggataatggagggaatcagaatgctttgggcctggcgtggtggctcacacctgtaatcccagcactttaggaggctaaggtgggcagatcacatgaggccaggcattcgagatcagcctaaccaatatggcgaaaccctgtctctactaaaaacacacaaaaaattaaccaggcatagtgacggccccctgtaatcccagctactcgaggggctgaggcatgagaatcacttgaacctgggaggtggaggttgtagtgaatcgagactgtgccactgcactccagcctgggcaacagagtgaaactctgtcacacacacacacacacacacacacacacacacacaattcactttgaacatatgcagagtggaagcacgactactttctatgaatagcaatgtgagtcctactaggacaggactgtgtcaatgcagaagaaaaagcaaatggaaccccttgggtcaaatagaagattagaagttagaaaagaggaaacaaccctggatcacagcagaagttacttacttgagacagttctgtgtcactaatcatctgaaaccttagagacctaaaacaacaacaatcatttattttgctcacaaatatacaatctgggcagggctcagtacagataggtcatttctgttccatataattttagctgaaacagctcaatgaggactgccagatccactttcaagatatttcattcatatggctgaggctggctctctgggagctctgccagagcagtgggctgtgaacctccttcccatgtgagtctatctccaggatgtttgggatcatttatggctgggttccaagaacaaacagcctgagagagaaaatgagaaactgatggagtcttaatgtctggaccaaaaaaacttggttctgctgcattctatcagttaagtggtcacagtacccagattcgagggcaggagatatagatgtcatgtctcagtgggaagaatgtcaaataattttggtaccatgttttaagatggccacagaggaaataattagaacaggcagccaaaattttactcttgagaattcctaataggccaagttaactgctaaataaagtgtatgtagttctctttggattgggtggatttagtcacacaagtccttttaaaatcctgagttaaaaatattcctttttttactattatttatgactcagttaggtcaatcctacctgattatccaccacgattttggagattaacatcagcaaaataggagtagcataatcctatatgaaacgtagtcttggtaagaaaatgacaccaagcaagtcataaccagacatatcttaaaagcaactatataaaagagacatccatgggagaggaagaaagataaaaatgatagcaaatttctcattggaagtaatgcaaataagaagatggcaaagcagtatctttaaagtacagtaagtcctcacttaacattgtagataggttcttgaaaatggcaacttttagcaaaatgatgtacagcaggccctcgaataacattgtttccttcgacattttttcattacaatgttgatgagaaaaaaatgcttttattatacgttgttttgtttaaagtttccaagaacctactgatgacattgaggacctactgtactgaaaacaaaacaaaacaaaacaaaacaaaaaaacctgccagcctaaaattctgtatccagtgaaattatctctgaaaaataaagatgaaataaaggcttttcaggcatataaaagttgaaaaaatgcattgccagcagacctgcactaatgtcctttaggcaggaagaaaatgatatcagatggaattctgaatatatgcaaagaaataaagggcactggaaatggtactacatgcgtaaatgtataagattttaagaatatctttaaaagataattatttttaaaaaataatgtactttggaatttataaaataggtataggtaaaatgtatgaaaataatagcataaaagctgggagtgaagaaacggaagtacactatcataaggctcttataccttacatgaaatatatagtatgatttgaaggcagactgtggtgagttaaaagcatatggtacatatgaaaccctaaagcagccactgccactaatataataaaacaaagttatatacaataagtcaacaaaggagataaaatggaataatgaaaatacttaatgaaatcaaaagaaggcagaaaaaggggcaaaggtatttaaaaaaagatggtacaaatagaaaacaaatagcaagaggatagccccaaacctagccatatcaataatcacattaaatacaaatggcctaaatatgaccattaaaaaggagacataatcagactgaatttttaaagaaaatacgtgagaacaaactatatgagagacatactttaaaaacacaaataggttaacagtgaaagaatgcagaaaatggagaaagatatactatgctaatgaactgtccctcagtgagttaaagaaaccaatgactaaatttttgggcttataagatagcagataagaaaagaaacaacttgctgaaaagctgaaactgaaactgtgcaccaaagagtaagaaaccagtaactaacagaaactcttgagctggcaggatatcagataagaagcaacttgctgaaacgctgaaactcccttggcttctgatatcaagaaaaaaaaactggctgaaatcagttggaaccaagatggcctactggagtttgcacagaatgagcttgctgacatcacagcctaaatttccaccatatgtttcatactaactccccctgatttgcacatgagacctgtgatctagcatgaagagataactgcgcatgcctaaggactttccagacctccctttccttccaccaatcacctactgatctcagaatctaccccctgaacttttcctaaaataaatattgtcttgaagccagcacagggagacagatttgagcttgacactcttattttcttgtgagtcaacttgcaatataaagcttttcttttctcaaaaactcaatgtcattatattggcttctagcacatccagcagcaagacacttttgtgcagtaacactaataatggtcaaaagaaagctggctatctacatatgtctacctatttatctagaggcataaatctcatctatatctctatcacacatatttcagagaggcatattaccagggataaagaaggtcatttcataatgataaagaggtaaatttatcaagaggacataacagtcttaagtgtttatgcacctaataacagagctttaaagtagataaaacttcacagaactacaaggagatatagaaaaatttacaattatggtagaagatttctttttttttttttttaatttgagacaaagtctttctcttttgcccaggctggagtgcaatggtgcaatcttgtctcactgcaacctctgccttctgggttcaagcgattctcctgcctcagcctcctgagtagctaagattgcaggcgtgtgccaccactaccagctaatagtagtatttttagtagagatggggtttcaccatgttggccaggctggtctcaaactcctgacctcaagtgatctgcctgcctcagcctccaaaagtgctgggattgcaggcgtgagccaccacgcccggccaattatggtagaagatttcaatacccatttctcaataatccatagaataaggaggcagagttagcaaggatatagtagacttaaataacactgtcaaccaagttggcctaattaacatatatagaacactctacctaacaatattagaatgttcatcctttttgagtgcaaacagaatctttaccaagacagaccatattctgggccgataaactggaagtagctcaaatgtccatcagaaggagaatgggcaaacaaattgcggcatagccatataatggctactactaagcattagaaagaaattaattggtcatacatgcaacaccatggacaaatctcaagataattatgttcagttgaaaccagacaaaaaagactacatactgtatgattctatttacataatatactagaaaacccaaattagtctatactttcggaaagcagattagtgcttgcctgagcagggttggagtggggatgtgggtgagagggtaggagaaaaggattaaaatagagcaggagaaactgctggggctactgagtatgttcacagtttaattgaggtgatggttttatggatgtctggatatgccaaagcttatcaaattgtacactttcgttacaataaaaagtcagcccatttagaagtttataaagaaaagtgaaaattgtttctctgctccagatcttacttaggtttagagtttgtattttctttctttctttctttcttttttctttttctttctttttttttttttgaggcagagtctagttctgtcgcccagactggagtgcagtggcatgatcttggctcactgcaacctccgcctcccaggttcaagcgattctcctgcctcagcctcctgagtagctgggattacaggcacctgccacagcgcccaggtaatttttgtatttttagtagagatggggtttcactgtgttggccaggctggtctcgaactcctgacctcgtgatctgcctgccttggcctcccaaagtgctgggattacaggcgtgagccaccacacccagcttattttttcttttaagggatgggtcttgctgtgttgcttgggctggcctcaaactcctgggctcaagcaatcctcctgtctcagagtttagcatttcttaacatcatcttaacccacactgttcaatataataacctactagccacaagtggccatccaaatttaaattaattacaattaaaatgtaaaactgggctgggtacagtagctcacgcctgtaatcccagcactttgggaggctgaggcgggcagatcacgaggtcaggagttccagatcagcctggccaatatggtgaaaccccatctctactaaaaatacaaaaattagccgggtgtgttggtgtgtgcctgtagttctagctactcgggaggctgaggcagaagaatcccttgaacctgggaggcggaggttgcagtgagccaagatgtgacactaactctaccctgggtgacagagcaagactccgtctaaaaaaaaaaaaaggaaaactcagtccttagttgcaataggcacattccaagaactcaatagccatttgtggctagaggccaacatattggagagttcagattatagaacatttctgccattagagaaagttcttttggatagctttttcctgggctatgtagagactcagcactattacaagcaacttagatctttcactggccgcttattgagcacttacttttgccagaaactgccaggtcctttatatgaattatctctaattcttgcagggaaagactaagagaagcttgaataattttccaagggtcgcagttactaactggtatacctaacatgtaaacctatgtctatctaaccccaaagcctaagttcttatgtgggtctcatatctcctgtgactgggccatccccctttccttctatacttgtgaaggattcttttcatattcaaccatggagtcttatatttatccctcctaaattttgtcttgttggattaagcttattgctccagattgtcaaaatattttaggatcctcatcctgtcattccatatgctcactcgccttccaagcttcatgtatttactgactttgataaatatggcccccctaaacttcatctgagtgatcgataaaaatcattgctaagacaagggaaaggatgaaggcctgtggtcggctatcagaaaccctcccgcttgaggttgacatcagtttaccagtctgtaaccttcaagataccagcataccaacccatttctactcttatctccagattctgagggatatgttctatatttggagcctaaagacctactagcaccatctagaatcatatgctggttataaatgacttccagatgttagccaaacaatgtttgcttctaaccaaacataagggccagaaagatcaagatattggcaccagtgttgatgcttgtcatttccacttagccctccttgctgccctcacctctaaagtggttgtttgataatttgttgctaaaagcaaaccatcccacaacagcggcttcaaataatagcaatcatttatttgctgatgaatttgaaatgtggacatggctgggtgagaacagtgggcctctactttactgtggcattggctgagcttaaagaacagctgtggactggcacaatgaggttcctctagcacaactctgagagtcttgtcagcttttctcatggcttcctgccgcctcctccccaccccgctttcaaacactgcccatattgaccaacatgtgtttcccacaatgtgccatcattgaccatctctagggctccatccagtgtgcctgtccttttccatgaatcctcaaagactcagccaaggtgtcacctctacctaggagccttccctgatatcccctgcccccacacaacttggtttgcattactgtctctctactgtgttccacagcatgctttatttccccttttcaaagcacttataccactgtaatggattatcctctttgtttgcctgtctttcccatgagatcctcagctcttcaggggatgaaattgttgtcattttgcattcccagaccatagcatagtgtgtaagatacagtgggtgctcaatctgttgaatcaatgagtgatatgatgatgacaggttctggaagttaaaatgatactatcgaaataccagattagcaacaggacctggcacctgtaaagagccacagtgaagcaggttctactggacataagattaaatgagttcaagtccataaagcatttggagcactgtctcacaaatagtaggcgccatataagcatttgttgttgctattatcattgttacgatgcttgcggctttcaggtgtagagctgtctttgccaaaggttctttttgctctcccattagggtttttctttaacagggaccttggacaacgttggcacttcctcctcctctgggagttccctgggaggaatcctctggaagagaaagtgtgttcaagactaacagagtctgcatgtgtttttctcttggcaaaggctcagtccctgctctagcaccattagcttcgctcctattgtcttccactgcagcaggtggatgcagggatcaccacctgccaggtgcttctaagcttccccaggcacagcagggctaagaaaagggagaagtgagttcagggacagagtgctctggtatgccgccaccctgggatcaacagctccctttcccccaggatgtcctttgtgggaaggctggaaggaaagccgcccactgaaatgaaaactcctcacactttgggaaagggtttggtctgcaccttaatttggaagaggtgtccaggttcttcaagttcccacaggccttgttcttgccctgcctttctggggtagtcagaagctgacaagtcccagagttctctcgtcatgtccgtgccccaccgtgcctggaatctggaggaacttgagcacggcagttttagcctgaactgtgattaatatttggtgctgggaaaactgggggttctgggctaagcctgaaattattctgggcaagggggaaaggggaatttccaagatgccctcgagagaatgagcggggcagggtcctgagtaagaggcttgcatgaagggggaaatggagaagggcgatagggaaacacccctgggtagaagggctaagaagcaagataagtgggaatggcagctgcagggcccacgaagagccatagctatgggcaaagttggcacaagaatcctggaggagaatgctggaggctggtgggtgatatggaggaaagaatggggttgagatgttctacttgtgctcctcttccatgtctcaggttaaacctcacttccttagagaggcctttcctgatcctcataaccctcattccattccggagtcagtctccatgggtctggatctcagctcctcacttacaagctcgacaaccttgtccaagtgtttaaactcttttaacttcagttttatcaatctgtgttatgtggctaaagatagtaccttctcacaaggttgtaaggattaaataaattaatatattgaaaatgcttagcacagagcccaggtcttgactggtaagagtgatcatgacatctgtttaatggcctgtctctcctactactgtgaggtctgtggggccgggaatatgctgtccactttggtgtcccccaacgcttcggtgtcccccaaacctagtgcagggcctggcttgttgtagggtcccagctgaatgaatgtgtaagtgaccagggtgggctcaggtggttgcagccttgtgggggttagggtctagggttatatttcactgcatggatcctttctttttctttcttttttttttgtttgaaatgaagtctcactctgttgcctgggctggagtatagtggtgtgatctcggctcactgcagcctccacctcctaggttccagtgattttcctgtctcagcctcctgagtagctgggactaaaggcatgtgccaccatgcctggctaatttttgtatttgtagtagagacggggtttctccatgttggccaggctggtctcaaaaccctgacctcaagtgatccactagcctcggcatcccaaagtgctgggaggcatatgccaccgcacctggcctaaacattttttttctaggtgatccaagttagaaaagacaccaagatggctgggtgtggtggctcactcctgtaatcccagcactttgggaggctgaggtgggcggatcacgaggtcaggagattgagaccatcctggcaaacatggtgaaaccccttctctactaaaaatacaaaaaaaattagctgggcgtggtggcgtgcgcctgcagtcccagctactcgggttgctgaggcaggagaaaggtgtgaacccgggaggtggagattgcagtgagccgagatcatgccactgcactctaacctggtgacagcgagactccgtctaaaaaaaaaaaaagacaccaagacaccaagattattcctggatagaataactgtggatgaccatttttctttccttctagttttttattccattatctattttatttttgtgttctctataatttttccataccaaagcaaggattacttttctaatggctgagaaaagaaaatgttattaaacaaacataacactctccgttgtctggaggtgaggagccatcactgaaggataagaatgggtaagaaatgcagggaataaacagtgtgtgatgggaaggcttctcagccttccaaggcctgttggaggtttcacaggatgttcctgccaagggaattctcaaagctcaaagccatgggggtggaggccctgcttccctccgtcttaagaaggatgtgacttgggcaagtttcagttttagcaggatcgccgtgtcttcagagggaaagaatgttctcaaccttgaatcttttgccaagaaatggtcctgagtgttttgaggggcaaaactgctgctcctgctgctcactcaagcactgttacttgatatcagcggattatttctctccagaggcttgggtcccctggatggagggcaaccctagctgttgccccagggggaaggcagggaggaggctcggacggagttaagaagcctaggtaggctgagttctagctctagctggctgcatgatccttcaatcattgagccttagccttcccatctaaagaaaggaggacatcttccctattgatatggaagatcttccctgttgacatggaattccgagtgtgaagtaatgctatatgtgaaaaatgccctggagatcataaagtgatggacagatgctgtttgtgaatgagaagagtattggtggaatagaggaaaacatagactctcttcagtgagttaagtttatgtttcttgcatctgccgattcaaaaacatgtatggcatttcctccttcttgtaggagcttcctgtatgttatactgtctgttcctcatttgccacatgttatagatgagaaaactggggctaagggaagatagactgacctggttttcccaagatcacagagctagtaagagtaggggaggaattatcacccccatttctccggatgaggaaactgaggcacagagagattaattcatttgtctgaagttatagagccagcaagtgtgaaagttatacctgagtctaaaagaaaaaaatcttttttttgagatggagttttgttcttgttgcccaggctggagtgcaatggcacgatctcggctcactgcaacctctgcctcctgggttcaagcgattatcctgccttagcctcctgggattacaggcgcccatcaccacaccctgctaattttctgtatttttagtagagatggggtttcactgtgttggccaggctgttctcgaactcctgacctcaggcaatctgtccacctcggcctcccaaagtgctgggattataggcatgagccactgcgccaggccccctgaatccaaatcttttaatgttactaatttagggttcatggactcttgaggggttctcagaaagacatcagaaggaaagtttgcatatgtgtacatttttgtggggagagggattccatatattgaatcaacttctcaaatgaatcagaaatcttggacctgtagttggtgcataagtaactctttctgtatttaaacattgatcatactacaagaaaagctttagtgatggcaagttactctggcacttaaaatgtgcttaattgttactgtgcttcaaggctgtgagtcaaaatgattgaattgcctttgatgcagctggccaacttgaatttttctttctcctggcttaataactcttcaatatctataagatgtcaagatcaaaatttttccttctgataccacattttgtttaatcttcaacttaggtgcaaaccctagacgaaaaaagactgtaattcaactcttcagtagccaggattgcctgtctccaaccccttctgaatctagttatgttggatactgggagagaagcatgtagactctttgggcctgacctttctgatttttctctggaagggcttcactgaaggggcacagaagaataatgtttctacagcatagatccaggggctcctccccaccaggaacccagcttagcaggcaggctgttcatgtggaactcgccaaaaccccgtgcaggtggatgtgcggaaacaccaaagaactgcacgattgtccctgcctttggaaggtctcattccctgtcattccttcattcagtcaacaaacttggaggacccagtatgtgctacattttgaggataaagtgatgaacaacacagacaagatccctgcccttgtggagtctatattcaaaccagagcttgaccttcaaactgagagaccaacttaaaaatggggccatctggccactaactgttatacaccctctgcttgggacacacggtctcagccctcctccaccttcaagtctgataggagagagatttcagagtggcccaaacaatctaaagtaaaagtgaacagagttcaaaataagtcctcaagggctgaggggagaccaaggggaagataatgcggtgagggcactgagagagggattcctagaggaattgtaccttgctttgaattttagccctaagctgcaaatcctagctaacttctaagtagatgctgacagctggcttctatttggtctgccatattgaatggctttgtccccaggacatggtggagatttagacaacccagggcagaaaatcctctaggaaaggaagtctgaactacaccgctggctttctgaaaggacaggatttgaggagctgggatggtagtaggggagagggcagctgggtggggtttcttccaggaaacaatgtggatgcaagatgcagtcctcgtccctggcctgcccttaccgctttagtatttcagatgagtcagctctcactctgccacctgctttctgtaactctgcagcaggccagcagcctccagtccaccctctcctcctcccagggctctggggtgaagccctccccaggaactccctggctcccagtacccatgggagaagctcttttcaactgacatgatttattttaacaataagaggaaaaaaccacatccgatttccacagaattagagttcctcctgacacgcctggacttgccagttgggaaggacactctcaagccatcctctatgccatttgccgttctgctgttcctttgcttggagggaagagatgcctgtttctatagggaggaagtttgaagtgagaagagaggacaaagattctgtgaatggaaagagcactggactgagagttcagggatgtggcctccggtcccagctccaccactactcagttgtctgacgaaggaaacagaaagttgtgatacaatgtgggtgacacattgcctagaaagaagtgccgttgtgatacgcttatgttggtgggatgggggaaagaaataacaggtttgtatggagtgttatgaaagaattaaatcttaaccttccattggggtaagctgatggaaacaaccatagcaaaggacagactgaatatttttttattctctttatagaaaataacagtaaaaaaaagtattgacataggagaaggaaacaaaaagttgtcaggagttaatgaatagaaatattatttttttctggattttatggtgtttgtgttatttgttagcttttatgaatttgtaatttgttgtaatttctttctaaataagtatttacttttgtctctaattttgtccatctatttttgaattcaattttcaaattcaaaacgcttctctcggccgggcacggtggctcacgcctgtaatcccagcactttgggaggtcgaggagggcggatcacgaggtcaggagatcgagaccatcctggctaacacagtgaaaccccgtctctactaaaaatacaaaaaattagccaggcgaggtggtgggcgcctgtagtcccagctactcgggaggctgaggcaggagaatggcatgaaccccggggggcggagcctgcagtgagccgagatcgtgccactgcactccagcctgggtgacagcgagactccgtctcaaaaaacaaaacaaaacaaaacaaaaaaaacaaaaagaacaaaatgcttctctctgggcctcagctgttccctcatctgtaaatgagaagggtgggccagatgctctttcatgtctggtgtaatgaagccctggagtgggctgcctatgactgcacgcagctgtaccacaccccacctgggtgtctttgggtgaagtacttggtagctccaagtctcatcttccttatccaaaatgatggacacaaaaatagtattgacctcatggaataggtgtgaagatgaaaacagacaatgcatatggatgcttcacacagaccctggggtggcaaatgtgctcagtacttgttagttattagtgtgagtctactcttttagtctatgaattttgttagaggaactcctgcttaccaggcctctggtttaataaaacatgactggagtgacacatttctaagctcaccaccacttataattacagaagattgatggctatataggacatctcccaccaagcctgcagaatgtccagatgtcccaagtacagcccactttactcagagataacgtcaatgagcagactcaagttgaaggattaatggtcactagagcaccaacagcccctacctttagtgagcacatctgcacattccaagtttaatcatagctccttatagtttcttataagcagagatgttcctaaaggacaggggttcctcctcctgctttctgggcatgccctactctctaatggagtagtttccaataaatttgcttctttgtctgtgctccaattctttcctgtgtgagatctaagaacccactcttggggtctagattgggatcctcttttctggcaacatcttgagtatgtgaccatgagaaatgttagaaattggagtgaaaggtacgtaaacatttgaacccaataccattctctggttctcccagaggcacagtaaaaaaaagtattgacatagaagaaggaaacaaaaagttgtcaggagttaaagaataaagatttttttttctggattttgtggtgtttgtggtatttgttagcttttatgatttgtaatttgttgtaatttctctttctaaataaacgtttacttttgtctctaattttgtatttctatttttgaattcaatttattttcccgcagacagggtctcactctgttgcccaggctggagtgcaatggtgaaattatagcagactgcagtcttcaactcctgacctcaagcaattgtcctgcctcctcaacttcctgactacaggtgtgcatgaggactacaggcaggcatgtgccaacacatgcagctttttttttttttttttttcagagatgtggtctcgctttgttgcctacactggtctcaaactcttggcctcaagggatcctcccacctcggcttcccaaagtgcagagattacaggtgtgagccactgtgcccagcctgaattcaatttcttaaaaggactctccccacccaattgtatgagctatgcatggccagatttagcaaatacaaatacaagacacccagttaacttggaatttcaggtagataaacactgagatgttttcattgaaattcaaagttaaatatgcatcttgtatccagcgggaatataaaaaaggaaagtagtggtcaactcaaccagggttgaagtggggaggaggaggggagtggggagaggaaaggaagaggggagaagtttcacaaaggaagtcacactggagctaggttttgaacgttaggttggtgtttacaaggtaggtgaggcagcggggctttctaggtgagatgagcctgtgaggtgtgggagatctgcaagagagatgaggcggaaaatgtaggcgaagtccaggctgtgatgggtctggatgctgtggggagcagatttcctgctactgggaggccccagggcgttatgctgggagttttagactggagagttccaagactgggtttgcattttaaaaagtccacctacctagggaagagtggattgttcaggagaggaatggggaggcatcagttgggctctttccattactatccctccatcccatcaccactggggctctttcataacatttgaaccacagagcccattgacataagatgtgtcacccagggtctgaggctttgaacagactttgaccaagatccctgtgggcaaaaaaggaggaggagaaggaagtacaggctgaagtggcataggtgcccaatgtggatttgtgcttccctccccaggagcacaggtgtggccagtttggatttccttaagtcctcagcttcctgggtaatgacaagtcagaacagcatggcttgggagagttatgtcacctcctctgctgaatgggcttgaggttcctcacaagtctaggttcctttccactctacctaatcctagagtgaaagggcagcatggggttagaaagggcgctgagccagaggtaaggagatagaggtttgagagcagttgtgccacttccttgcggtgccatggagggctggttcacttctctatttcttcatcactgtaatgtgaacattgaactgagttatctctgttatattttctgactctcatttccaaatatcacaataaaggagagccaaccccactgaaaatgaggaataaaagagagagaaaagataaaaaaacaaaaacaaaacaaaggagaaacttctttaggtttaaatttcccagttctttttctcacctttttttttgttttattttcaaagctatacagaagttcacacatatcattatgatctagatatatttaccaagacatttaaacatttatgtattctgttttaaaatccctattagcttcccaaataaaatacccatccatcattatcagttttatatatatatatatatttgagatggagtcttgctctgttgcccaggctggagtgcagtggtgcggtctcggctcactgcaagctctgcctcccgggttcatgccattctcccgcctctgcctgccgagtagctggaattacaggtactgccaccacgccaggctaattttttgtatttttagtagagacggggtttcaccacattggctaggatggtctcgatctcctgacctcgtgatccgcccgccttggcctcccaaagtgctgggattacaggcgtgagccaccgctcctggcctacgtttctttttttacaaattcgttctcagtcatacttcttcgtgttttatagtcctcataatgataggttctttctcaaatctaaccaaaattactcatatagatctaatacatttcatctaaatcctgcaatgggccacacattgctcaagtccatggagcctcattcccacagaaggcaataggcatggtaccctctggaattatgcaatttttgtatgcgctcaagactcagtacttaggaatggccaggatccactcttttaagggaaggaaattgccctggcatcattatgaaaaattcatgaggttggagtgcatgttaggcggggataaggaattggaagacatgagagagttgtgtccagaacatgtcaaactcaaagcattctccattctggctcgccaatcttccctcacattctttctgcttccctactcaacaagtggaaaattgagctctgatatctcaatggtgggtccattggtcccagaagtcctaattctaaggcagatgcaaccttgtgtctggagaccagattcataattgaattgcaatcctgggaaagatgccattctatctcaatctatattcttatttttgatattaggggtcaggcagcaaggcttaagatgaagagaacttatttcttattgttcccccttcttcctgatttaggagctctaaagggaattataaaattgataataaatgtcattttcaagttgcttattatgcgccaggtactgtgctgaggaattatgtgtaatcacttcatcttcatgctgcgcctacatggtgaacgtgcagtaggcatgatgtgtaccattttacagatgagtaaacaggcactgagattaagtggcttgccttcagtctgacagccatagaaagcagagccagtcaacccagcttccagtaccagcgattatggtacaccacatgctggaagaggagctataaacacatcacttatttcccttcccctgcaagcttcctgatatgacatatctgccctgaaatgaaagctaggtcagaacatatagcctgagcacaaggggtgaatgtggggtgagactcagcatggacagtgttgcaaatccccttacatgtgcagctgggctctgagctgctattctcacatgtgcagagggactccgagccaggcagctcaggccctgctgggaaaacagcacccacctccctccatcccacccctctgggggaaacaagggtgggagtaggggagattcccgaggtcaagagtagctctttgcaccctctccaaaggagcagaaagatgtccattagctcctaacaaaggtgtcttctccttttccaggtgcctggcacacaggatagaaatacataatatttattaaggagtacttactatgacacaggtcctttagctcattcaaatcctcacagttttattttacctattttatggagcttcagaaaggctttaagtagcttttccagtgtctatagacctaatgcatttcatccagactctgcaatagggccacatattgctcaactccatggaacctcattcccatagaaggcaataggcatggtaacctttctgagcaaggcagagagggtacctgcctggccataccctcgtcttatttccttaattgttttctttcttctttaagatatagctgattaatcattattatgaaatgcctctttcttctgggtcttgacatgcagcttctaggaaaaatgataaactccccatctccatgcaaatgagattttttttgcaattctatgttcatacagaaaaatccaagttaggtcactttcctgagagctgtggcatgctaccaagaagagaagggagataaggaagaagagaagagagtgaaccagggtttaaatccagaactacgttgtgaaccactatagtctaccacttccctcaacacttaccattttattatgtccaagatgctggaccacaagacatcaagtccctggggtttctttcccttgcacctgtcccgtaaaaggccctgatctttcctgtcccttttccttctctgccggtgccctgtggccctctctgtctcccaaatctggctgcaggaacagggtttgtaccagcccagtggggtctcataattgcacctcatcccaaggtcacttcatttggttaaaaataagctccatttattctgggagtctgtgtttggggatgtcaaaagacaaaattacaacacatttagtttaaagatcttaattggcttttatttgcaattctagaatcaggcaacatcctattttataaaaatagaatgagtggtcccatgagctgacagaggagagtggttttgtgggcagacaactgctagaggaagcagaaacagagaacaaaaagcaaactggtcatttaaaagttactttccttgtaaaggttagagcagaggagacttccttatacgctggctaaaactggcttgtttcaggatttggctattatctttctctctcctgatttctcagaaggttagataaacagtttagtttcagcttggtggtgtggaacttcattcagcatgagcgactccatttaggtttggcctattggcctagtgcagtaactcagtccaaaccaattaccccctggaaattttatttaatgggaagaaactgtttataccctatcttttcattgccccaaacctgatccctagagaacttcttggtaaagagtttatgtaaaaaggtaatttagttagagagtcttctagcccaagaataaggatttcaggtcctggctctgccactggctgatcttaaacctctcttctttccagtctcattttctctctctctgcattaatcaagaatgagagaaccctccaggggacaagatgaaggggaaatagatgatgtgcaaagaaatccttgctttatgaggggaaaaagtgttcctcatgaagttcaacaaaatgatgcaggtaaagcagttagctagcacctggcacatggcagacactcatagctgcctaaggcattggagaactggatcgtgctgcagccagaggcacctgcagagcctcatgggctggctgctgcagggtgtggctgattgagagtgcttttgtgagttggcctgcagggtacacttggtaacgtgccacagctctcaggaaagtgacctaagttggatttttctgcatggacatagaattgcaaaaaattctcatttgcatggagatggggagtttatttttcctagaagctgcatgtcaagacccagaagaaagaggcatttcataataatgattaatcagctatatcttaaagaagaaagaaaacaattaaggaaatacaatactaagaaaacaaggggaaaaaacaatctccccaaggtggatccacccagcaaaccttgacagcatttcctcttatccacctgaataaaaatgaccagccctttccaaatggcagagagcactgagaggagacacaaggagcagcccgcaagcaccaagtgagaggtgaggctcacgctgtccgtcatcaggggctcctatgcaccgccatcctagccctcctccttcactgccgcagggaggtgacctgttaccattgtgtatggctatgatgttccagatgctgggcatttggtagaatgggaaggggtactctatagaaaaggtgaattttctagtatcttattttcaacgagaagagatagagagtgggaaagaaggagtgaaggaaggaaaggtcaaggatttaatgtctttactattgcttttttgttccaagaactgtgttgggcactttataatgtgttatcattgtttaatcctttgcaatgtgaaatatctttttaaatgtaaggagcatcactggttcagaaatgggttcctgtctgtctggtgtcaggggagctactgggatcccaggctatgatgtcagagggaaacaatgttgtaagtggggtggagtagcagtaaagacagccagctcagggactggcccgccttctctcaaaccctggcttgggcaggttacttcatttttttggtaaaatgggaacagaaacagagcctacttcatagggtggttgtgagcattaaatgagaaaattacgtaaaattcttgggacagtgcccaatgcacatggcacgcaggataaatgttacttactactaatatctgaattagccaagatgtctggaattgcctcaccaagctaagggagacatctttctcctccacaaaatgcgcaagtctcctggcatgggatgagcaggcaatatctgcctgcttctgagagttaccttgtcagaagaaaaactgcactctctttcttggctttctagaagcaccccagtagcgttctgaggagacagagctctgggggactctctacaaacttccctggcaatggggcccatccttgtttagccagaaagagaggttgataaaagaggaaaggagctctttggcttaatgcctgccacgtggtaaggtcttgacatacacctgtctattccctgggaatgatgcccagttaaggagagacaggcaaaaatggtttctaaacaggatttgctgtttctggctttccagaggagctgggaatcctgaggaaggcatggggagtgggggcagctggggttcacactcacacgtgtgagttacagcagctttaactatagctctacagtcctcgcagctggctccctgtgtcttatgccctcctctcctccacggccacacacgatacacttaccttggcacacacagctgtaaatgggagatctcagtgggcaccatgcaaagtgcatagcagagggctgctctcgtcacatgtgttgtcataagacatgcgttaaggctaagctctatttataagcttgtgaaatgtgggtgaaaacagagataaccccataagctgtaccattatattttacgcacttttctctgtgcgcattatgtggcacaatacaaagtggttaaatgaagaggcagcaagaaagacagaggcaagaagggtaagagaatgagaagcggtggcaaacctctcagggtctggccctggctatgaagcagctagctgcaaacatgcccctcataccctttggctcagcaggtgaccgacgggaagttgccaagctgccctctacctttggcttcttcccctagctccttattgtggctaattagttcttgaagatgccttgtgcctccctttcccatctctccagaaggtgaaatctccacagctggcttcaaacaaatgattttaagcagatacactcttgaggtttataataaaagggtgttacttatttcaggggcaaacatcaaaaaccaagtgtgtttttatggtttttcacatctgttgccgaattcctagggcatcttaccaaccctgcttttcctatttaatttattaaaaacaatgcttttcacccctgttgacaaagtaggctgtgttgagtcataggagagtgatatgcatacaagtatgcttcctgggacttaagagagtggtgtatcgtgttttctggggtggaggtgggggcatggggtgagggtggggaagaactcatatccagttgactcaagaaaaccagaggagatacatacccctgtaactcctcaaggctgaagtgtttagtgttgttttcttgtattcctcccggcttgccttcgaggctggaaaggagcgtcaatcaggggtcttctttttcattgccctccactcttggctggacagctgacttcctctcctttctgcaggcatgaagttacagtgtgtttccctttggctcctgggtacaatactgatattgtgctcagtagacaaccacggtctcaggagatgtctgatttccacagacatgcaccatatagaagagagtttccaagaaatcaaaagagccatcgtgagtatgggttggtgtaaaggtgtggatgacggagtatccctccccttacatcttagcttgaaaatgagttccttctcattgccttttgcatctcagaagaacataggataccgattgcttatgtctgttcttatgtttccctccacagcaagctaaggacaccttcccaaatgtcactatcctgtccacattggagactctgcagatcattaaggtattggcctgtgtctgctttttccagtatttttatcttcatgtctaaatggctctgggctgagaaagaaatccctaccttgtccccttctctttcctaatctccaatgtactctaaatgcaccaggcttctttgtcagatgatgtgttagggcacgctagtgtcccagggatatgtaacccctgggaggaattaaagaagtgctgcttcctagagagtgattgggggtgccaggtgctcagaggggacaggatttctgtggcttgggggtaattttggaaggtcccatggaggtagctaagaaaacaaacggtgacttaacccgaggaggttgtagatcagtgaataagagggaggaaggaatttgggcaggataagataatgggtgtaagatcagtgaaggtcggacatagaggtgaccaggtttgtgacccaaaggacatataagtgagtggtgggagatgaagtgaaaaaataccctggagtcattttataaaggtccctggagccaggctgagcctcaggcttataatacagacaataggctgggtgcagtggcttatgcctgtaatttcagcattttgggaggctgaggctggtaggattgcttgagatcggggcttgagaccagccagagcaacatagcatgacctcgtctctacaaaacaaaacaaaacaattatcagggcatagtggcatgcaactctattcccagctacttgggcggctgagatgggaggattgcttgagcctgggaggtcaaagctgcagtgagccatgattgtgtcaatgcactccagcctgggtgccagattgagacacccaaaaagaataaaagaatgtgtgttagggcatgctagtgtcccaaggacttggaatccctgggaggaattaaagaagtgccgcttcctagagagtgattgggagctcccagtgctcagaggggattaggatttctgtggcttaggggtaattttggaaggccccatgggggtataaaagaataaaagaaaataatagcagcaatagagagtcaatgagatttttgagcccaaagttatatgatcataaattgttttagaaagacaatctggtgctgttcttacaatggacaacgtgaggcaggaaagccagtgacaagatctgcccaatcatctagacaggaggtgatgaaagtatgttacaaaatagctggcttaccaggtgatcattcattttacaaaaaggcccatgagagatgcctttaaaagagagctcctccagtcctgggaagtattctagacagatccagttttgggagggattttgtatgacagagtgtaaggtatatttgtattgagttacttttttctcaggtttctctgcatacgtgagagacacacacacacacctcttcataattcttctaagcagtgatttatttgtggtgaagagatgtagccacttactaaataatattctagccaactgtattatagacacagaagatatgacagctagaagggacccaaaagaccatctattccaaaaccatcattttcaaatgaggacagtgagaccttgggagggagcatgactagttagtggcagagttaggaacagacccccaaatatatgcccccatcttcagattctttctcctctcaaggttgggaagtagctcatgtggaataagaaaaggagtcaataaggattcaggttccttcccttcctttcccttcccttcccttcccttcccttcccttcccttcccttcccttcccttcccttcccttcctctctccttcccttcctttctcactcccaccttccttttttctgcagtgttcctttttctagtaccacagtctttgatagtgcagaggggtgtaacattttgcccttctggttaagagaatcagcaacagtgaaggaagagaagggtttttgtgttgccatctaggaaaagctgacactggggccaaggaggctttgcttcttgaatgaagatgggtgtgctgtcccaccgttaaccactccctgcttagactgaacagttaatcttctgcagagtaactggctctcagggcagatggcgggcaaacttctagaaggaaactgtctagccaacttcactgggctgtgcctgggaatttagagactatttctttgggacatctgcactctgcaggctgcagacctacccaaatatgcccatttctgcagctgtcggtctctcttgcaaatctcagcctcattccaatgacctttctggttttaaaaggacagactacaggagagctgagcagtgtggtccagagtaaggtggccagaatgaatgcaatgtgattacagttggaggaatgcatacctagcaggatgactggcatgcaacagcccttgcatgttggcagatgggagacataacagagaggcaacttcagcccctgtagtgtagggaagttcttttcaagaaagctgctcagccatcagtccttttaaaaaggaggcaactggttcctggaaagatttcagtggaagttagtgatgacacgctagggatactgcagagagaattagcctatgatggattctgggccccatccttagtaaatgtatttctcggccatacagaaaaaggggagaactggaatctcttctcactatttttgtcataagtagctttgatgggaataagagaggatgaacactctgagaccattacgaatttttccaaaatgacttttagttctctcatgtgtcgctgcccctactcaaatggactgccctggtctccaacataatgagagaagaggcctctagtgtttccctaatttgtgtttgtagcccttagatgtgtgctgcgtgaccaagaacctcctggcgttctacgtggacagggtgttcaaggatcatcaggagccaaaccccaaaatcttgagaaaaatcagcagcattgccaactctttcctctacatgcagaaaactctgcggcaatgtgtgagtcactgggtcagaattccagcatctgctccctgtctgcccaaggagaggccaggaagtgctggcccccatcggcctcctgatatggtgcttggagtcaaaggaaattctctgcgcacgtccacagggagaactgtggagaacctctcccagtggccactgcttccccagggctccctgcctgctgacaactcctcagatggtctcctcctagataaccctcctggggtgaccaacttatgtcaacatattccttagtaagaggcatggcaaggactccagttctactgtaagcatacccctggtttctttatttctggccctttggtgtctttacatcaataaacctctgggtagttccttggtatggcctatccctaaaggttacttagaaattcattgcgatctatttaaatccaacatcagaaacaaaaccaacacaaaccaacaaaaacttagaccaggagagaacctgggctctagccccattcctgctaatgatttcctgtgagactttgtggcaagtgacttcacctctctgtgcctcggattctaaaattgttagaagagttgatggcccctgtcctacttgcattaatatgataatggactcaaataaattcacctaaccagttgtttaattaacaattcgttaaaattaattatctaattaataattaacatttaacaaatgtttgttgagtgcctaccctgtgggatgcagcactcagagtggtgataagacagatatggtgcctgctttcctagtgctgacagtctgatgtgttctaaatgcagaaaaaacaaaaggcgtgggcagatgcaggtgactctacagacaagctctattcttccgtggctgctcccacctgagtttactcatctgactctcactgtgggagggaggagaaatgtcacttctcatgtggggaggcaggagtaagagagggccagagtggaaatgtcctctgataggagcttcctccactttatcacagcaggaacagaggcagtgtcactgcaggcaggaagccaccaatgccaccagagtcatccatgacaactatgatcaggtaagatctgggaagaggttggggaagatggaagatgagaggtagatcaggagggtgccaggccttcagcctcctctccacttaaattcatgcattcactctataagcagccattgtgggcaggcctcaattctctgtgtctgtaaagagagttttgattttacctcatttgctaatctcctgggctccccatctccatcattcctccaccattttctcataccctcatatatcaagcctgacctgtatgatttggggaaagcacccactgcttaagatgggatgacacagagggagcaaagatcccccatgaaatgtgagctgttacgcctgaaacgtgttacctgcacgccgtcactgcgatcactacctgcccccccatattgtgtgtagtgatgaagacatggtacttctcatgttgatgttggtgtaaaatgcacatctcacgtggaggtagaggaagaagcagtgtttctcatgagcatcagttcaagatcttgttaaaatgcagattctggctcagcagggctgggatgagcctgagtttctgcatttagatcacactgtcaaatgataccaatgctttgaagagcaagagttagggagtctgttatgggctctgcttctttgtggagagactctgtaagataatgttatagaaatagctaagagttacatggttcttactataagccaggtattgctctaggcacacaacaagtattaacacacattcgtccttcccaacaatgctatgagtcattatctgcattggatacattaagaaactgaggctcgagcaggtaaagtaactaaactaagttcacactgcaactgcacggcagaggtaggattcaattccacgctggctggctctacaggacgcgctaaaagcatgaactcagtctgctgaggaaggaggtggaataaggcaggagacttgggtttcatttccagctctgttactaactggctgtgtgacattgggtaggacacttgctctaggggctttagtgctctaatatgtcaaatgaggacaacatgctctccctacccactgtccagcacctcagggacaaagatgttctgggataacagaagcactaaagcaagctggtgtggagaagaaaatcagcggaactggccagtaaggcagatttttttttcctgtgaaaaacagaggaaaaaaaaacctgagggaaaagaatgaagaattttaaagttctgtttataaggagctgacataatttaactacttgtttgtggggaaaaaaattggttgcctgcgaggaaaataatattgagtctgtatgttatgcaaatatatttcgtgacaaaaaaacaaaaacagaaacaaaaccttgtgggaaccagcatatgaagaaagtgacttgaaaaccattacacagtctagaaaggtgggttcttacattgatctctgatttcagctggaggtccacgctgctgccattaaatccctgggagagctcgacgtctttctagcctggattaataagaatcatgaagtaatgttctcagcttgatgacaaggaacctgtatagtgatccagggatgaacaccccctgtgcggtttactgtgggagacagcccaccttgaaggggaaggagatggggaaggccccttgcagctgaaagtcccactggctggcctcaggctgtcttattccgcttgaaaatagccaaaaagtctactgtggtatttgtaataaactctatctgctgaaagggcctgcaggccatcctgggagtaaagggctgccttcccatctaatttattgtaaagtcatatagtccatgtctgtgatgtgagccaagtgatatcctgtagtacacattgtactgagtggtttttctgaataaattccatattttacctatgaatggaaggatcttttcattcagggagagtcagtcaagactgaggacagggtgtttctgacagagggatggttgtcatggtgacaaagctgaacaagcacagacacaagtaagtagagaggccactgggtagagaggctgaaaagggtaccaacatctagatggacactgcatagatgattcagagcacaaatgtgtatctttcagatttcatatcacatgctttaatggaaagaacaagacctctgaagtccaattgatctggttccaatcctatgtgactttgaacaaagcacttaacgtttctaagactcagtgtcctctgttgtaaagtggagatattaacaccagtcctgtagtgttgctgtgagcatcgagtaaggaaaaggtctctcatgacctcagcagggtgggagacagcacggtgcaatataaagactgccgactcaggggccaccttctggttctaaggcatctcctgccatgaatttcccagggcaggtcagtacatttctttggtccttagttgttagtattgtggatactgacccttctgtactacctgctccatataattatttatttatttatggagacagggtctcactttgtcacccaggctggagcacagtggcatggtcatagctcactgtagtctcaaactcctagctcaatcaatcctccctcctcggcctcccaaagttctggcattacagacttaagccaccacacctgcctctataatcatttaaaagctggagtcattatgagggctttgacaaccctgatatctgcacacacacccctcctggctgttttccctaactgtgtccctgctccttccccaggctcactgtgacccagccatagttgtttgctctgtgtttcgcaaacacaccaggcatgttctcaccatacagtgtatgcactttgtgtacatgcacactcataaactgaggtagggttaaaaaataaaacaaaccctccacacattatgcgttaatgggattcatacgctattagggagcagggttgtttgctgaggacctaacttttccaaagtgaccttggatgggcacccaccctgagcaggctgggtgatggcagttatagcatttctgatcttttatcactgccctgggatgtgcttcccctggacacctgcatggcttgcacctccacgtctttcagaccttcactccaaaggtctcgtattggaggataaccccccatttccaccttcagcacactttgtacccctttcctgtttatctagcatcctattttgtttattagctgctcctccacatgaatgtaagcttcatgagtgtagggatggtttagtttgttcactgcctggcacttagtaggtgttaaattcacaattcacctagattatttattcaagaaatgtgaataaccacaaacatgtatatagtgcttcctatatgccagccgatagtctaagaaatacacttcttgtaatataatataatataaatacatatatatatatttcatttaattctcacaacaatcctattgtaggtttttagaatgaaataaaatgaaaaaggccacctcattgattgttagcagtatggataattaaaccctaagaaggaaactaggcacagagagcttaagtaacttaccctaggccacatatcgcataagtagaagagctgagcttccaatccaggcagccacattccagaatgaactataatgtccacaataatgtacatatgttgagttcatcatgtgccaggcaccaaggtgagaacttaacttatggctcctcctttactcctcacgatagttctctaaggtacgattataattataatgtgaataactctgcactttgggaggctgaggtgggtggatcactaggtcaggagttcgagaccagccaggtcaacacggtgaaactccgtctctactaaaaatagaaaaaatagccaggcatggtggcgggcacctataatcccagctactggggaggctgaggcaagagaattgcttgaactcgggtggcagaggttgcagtgagctgagattgcttcattgcactccagcctgggtgacagagctagactctgtctcaaaaaaaaaaaaaaattgtctggagattagtgaggtttgacaatacacctaaggccatgtttctagttgtacaacagagattcaaactccgggtgtcctactccaaagcctgagccctccatcatgatggtttgtggcttgtgcatcttgctcatgtgacaagaagcccacaagagaaggtgatttactggcataatgacctgcacctgtaggaaatattgttattatcaatggtagtagaagtactagtaggagaggaggaggagcaggaggaagataattgaagaagagctcatcctttctgaaatggctagtatcttgcttaaaactctcctaggtctcttgtttgcttcctttccccgtctacttttcctttctcttttttcagacttgaagaatatgtcccaatgctttttgagttcgcagtagttctggcatagtggggtgtgtgtgtgtgtgtgtgcgtgtgtgtttgtgtgtgtttcttcacagagctggtgcttaagaaatacatgctaagaagccaagagtaacattatctcccaaaccatgctgagtcctctgtcagcccctagtaggtacccttgaaaaatctggagctcacctccactgctaaggtgcaaggggagggaatccatgtcacgcaccagggccatgacaggtactttacacataggacctcattcaagcctcagaggaagccaagggggttggagttcttatcctcacacggtcagtgaaggcatctcaggctcagggaggtgggggagcttgcccaagtccacaaagctttgggatggcagatccagaaaatgaatccaggccccatcttcctggctttggtgccctctccttttgctgctaggggagttccttttatcctggacaagactgtataacctagggcccaggttactatgttgaatgccagcaatgaagataactaaacccagatgcaccaaaaggggcttggactaactagccacaagcttctgaagttacacatgaaattatggacatacacagagcaaaggagcagaggccaacttctgagtatgtcacgcaatgttcccggcccagctgaggcctgggctcctcctggggatgctctatcctccttccatcttccagagcaaattgttaatagccacacatgttcatactgctgaaacttcatactgctgaaaaaggcactgaagaggtaggaaaaacagtcttgaatcgctgatgccaccctgtccccaatcccccatcagtggcagtgtggtgcagagagcagttttgtgttctggggagagggagagcgcagcaattgtgaggcattgaaatcagtactgtccttgttacaggagaaagcaaaactggaacacattcacctgatggccacccatggagggagatttaaaccagccctacccagaggggagtcactgaccccaacagtcagaacttgagtttctgcaagccttaccactgtgggctaaagtgctctggggttccaaataaacttgaaattcagtctaggccagaaggactgcaactcctaggcaagtactagtgttgaactgggcccagagccagcagactagggtgtgaatgcacacaatatactgagacatcaaccaaggcagctaaagtggtaccagcattacccctcctctaaccccaggctgcacagctcatagttcaaaataatgagactccttccttccacttcaggagtggagacaaaagagtagggaggactttgtcttgtatcttggataccagctcaaccacagaaggatagggcactggtcagtcatgaggccccctttccaggccctagctcccacttgacatttctaggcacgccctgggccagaagggaaccagttgcctagaagggaagcacccagttttggcaggatacatcactggctaactgaagagcccttgggccctgaataaccagcaatgatatccaggtactatgtcgacggccttgggtgagactctgagacttgctggcttcacatgagactcagcacattcctaactatggtagctatggggtgagacttcttctgcttgggaaaagtggagggaaacgtaaaggggactttgttttgcaccttaggtaccagcttggacacaatggggtacagaaccaactgggctcctggggtccctgattctaggacttggctcttggatggcatttctgaacctgccctggggaacagtggagcccacagccatgaagggtgagtcccaggcctagaagcattcaccacaagctgactgaagagcccttgggaacactggcagtagtgtggcagtactctctgtgggcctgaagtggcggtagccatccgatgaggctctcctgcctttggaaagcggtagaaagagtgggaaagtctacatcttgtgatttgagtgccagctcaggtgcagtacaataaagaacagaacacagggtagactcctgaggttttttactctagtctctgactcctagatagcacctctgggggcctgggggaacttgtcaccctgataagaagactctagtctctgactcccagatagcacctctgggggcctgggggaacttgtcaccctgataagaatgacacaggcctggctggctttgctacctgctgattgtagggccccagggccttgagcaaacacaggcagtagctaggcaatggttacagaaggccttgggtgagacccagtgctgtggtggcttcaggtctgacccagcacagtccttggtggccacaggggtgcttgtgtcactccaccctgagctccaggtgtctcaaaacagagagatagactgtttgggagaaagtaagggaagaaaacaggaatctttgcctggtaatccagagaattcttctggatcttgtccaagattgtcaaggtggtacctctacaagtctgcaagaatcacagtgttactgggcttggggtgccccctaaagcagattgagcttagatcacaacactcaagtccttttgaacatctggaaagccttcctaagaaggacaggtacaaacaagcccagactgtgaagattacaatacctacctcttacaattaatagctaaatgcctagacacagagaaacatctacaagcatcaagataatctaggaaaatattacctcacctagtgaaataaataaggcaccagggaccaaccaatcctggagaaacagagatatgtgacctttcagggagagaattcaaaatagctgcgttgagaaaacccaaagaaattcaagatcacacagagaaggaattcagaattctatcagataaatttaacagagagattgaaataatgagaaaaataaagcagaaattctggagctgaaaaatgcaattggcatactgaagaatacgtcagagtttgtttttcgtttttggttttttttttttttttttgacagagtctcactctgttgcccaggctggagtgcagtgggcgatctcggctcactgcaagctccgcctcccaggttcacgccattctcccacctcagcctccccagtagctgggactacaggcacctgccactgcttccggctaattttgtttttgtatttttagtagagacggggtctcaccatgttagccaggatggtctcaatctcctgacctcgtgatctgcccgcctcggcctcccaaagtgctgggattacaggcatgagccgctgcgcccggccacatcagagttttttaatagcagaattcagcaagcagaagacaggctatttgaaaatatacagcaagaggagacaaaagaaaaagtaataaaaaacaatgaagcacgcctacaggatctagaaaataacttcaaaagggcaaatctaagagttattggccttaaagaggaagtacaggggtaggggtagaaaatttattgaaaggaataataacagagaacttctcaagcccagagaaagatattaatattgaagtacaagaagtttatagaacaccaagcaaatttaactcaaaggagactacgtcaaggcatttaataatcaaactcccaaaagtcaaagataaagaaaggatcctaaaagcaggaagaaaaaagaaacaacatacaccgtagcttcaatacatctggcagcagacttttcagtggaaaccttgtaggccaagagagagtggcatcatgacctatttaaagtgctgaagtaaaaaacttttactgtagaatatcagatctagtgaaaatagccttcaaacatgaaaaagaaataaggactttccaagacaaacaaaagctgagggatttcatcaacaccagacctgtcctgcaagagacgttaaagggagtgctttaatcagaaagaaaaggatgttaataagcagtaaggaatcatttgaaagtaaaaaactcactggtaatagtaagtgcacagaaaaatacagaatattataacactgtaactgtggtatgtaaactacttttatcttaagtagaaagactaaacaatgaaaaattatgaaaaatagtaacttccacttgaggagtggaacaagttttcgagacacagacagtacaataagatataaatagtaacaacaaaaagttaaaaagtgtgggaacaaagttaaggcatagagtctttattagtttttttttttttgcttgctttttgtttccttgtttatgcaaacagtgttaagttgttatcaagttaaattaacggactataaaatagtatttgcaagcctcatggtaacctcaaaccaaaaaacatacaatggatacacacaggcacaaaaatgaaaagcaagaaactaaattctatcaccagagaaaatcgctttcactaaaaggaagacaggaaggaaagacagaagaaagggaagatcacaaaccagccagaaaacaaatcacaaaatggcaggagtaagtccttacttatcaataataacattgaatgtaaatggactaaatgctccaatcaaaagacatagagtgactgaatggattttttaaaaaagacccaacgatctactacctacaagaaacatatttcatctattaagacacacagagtgaaaataaagggatggacaaacatattccacgcaaatggaaaccaaaaaagagcaggagtggctacagttaaatcagacaaaatagatttcaagacaaaagctgtaagaagagacaaagaaggtcactacataatgaaaatgggtcaattcagcaagaggatataacaattataaatacatatgaacttgatactggagcacccagatatataaagcaaatattagaacaaaagagagatagaccctgatacaataaaagctggagacttcaacagcccactttcagcactgaaaagatcttccagacagaaaatccacaaagaaacttaatctgcactatagaccaaaagaacctaatagatatttacagaacatttcatccaactgctgcagaacacattcttttcctcatgaggcacatggctcattctcaaggatagaccacattttaggtcataaaacaaggcaaaacattttaaaaaatttgagataccaagcatcttctctgaccacaatggaataaaactagaaacgaacaacaagaggaattttggaaattatacaaatacatggaaattaaacaatatgctcctgaataaccagcaggtaaatgaagacggaaattgaaaaatttcttgaagcaaatgataacagaaacacaagatgccaaaacctatgggatacaggaaaagcagtactaaaaagtaagtttatagctataagtgcctacatgaaaaaagaagagaaatgtcaactaaataacctaacaatacatcttaaacaacttgagaagtaagagcaaacctaatccaaaattagtagaaggaaagaaataataaaatcagcgcagaaataaaagaaattgaaatgaagaaaacaatacaaaagatcaatgaaacaaaaagttggttttttgaaaagttaaacaaagtggacaaacctttagccagactaactaggaaaaaagattcaaataaataaaatcggagatgaaaaaggagacattacaactgacaccacagaaattcaaaggatcattagtgggttactacgagcaactatatgccaacgaattggaaaatctagaagaaatgaaaaaatgaaaaaagtcctagacacatacaacctatcaagcttgaagacacatacaacctatcaagcttttgaagaaatccaaaacctgaacagaccaataacaagtaacaagattaaagctgtaagaaaaagtctcccagtggaaaaaaaagcccgggacccgatggcttcactgctgaattctacaagcatttaaagaagaactagtaccaatcctactcaaactattctgaaaaatagaggaagagggaatatttccaaactcattctatgaggccagtattatcattggctcattctcaaggatagaccatatgttaggtcacaaaacaagtcaaaacatttttaaaaaaaggaaatatcaagcatcttctctgaccacaatggaataaaactagaaaccaatagcaagaggaattttggaaattatacagatacatggaaattaaacaatacgctcctgaaccacagaaattcaaaggatcattagtggttactatgaaccactaaagacaaaaccaggcaaagacctctcaaaaaaagaaaactacaggccaatatctctgataactattgatgcaaaaatcctcaacaaaatactggcaaaccgaatttcacaatacagtgagatcattcatcatgaccaagtggggtttatccctggcatgcaaggatgtttcaacatatgcaaatgaatccatgtgatacatcatatcaacagaatgaaggataaaaaccacgtgattatttcaattgatgctgaaaaaggatttggtaaaatttaacatcccttcataaaaatccccaaaaaactggatatagaaggaacatacttcaacataataaaagccatataggacatactcacagcgagtatcatactgaatgaggaaaaactgaaagcctttcccctaagatatggaacaccatgaggatgtccactttcaccactgttattaaatgtagtacttgaagtgctagctagagcaatcaggcaaaagaaagaaatgaagggcatccacattggaaaagaaaaagtcaaattattcttgtttacacatgacataatcttatatttggaaaaacctaaagactcaaccaaaaactattagaactgataaacacattcagtaaagtggcaggatacaaaattaacacacaaaaatcagttgcatttctctatgccagtagtgaacaatctgaaaaatacatcaagaaagtaatctcatttacactaggcacaaataaaattaaatacctagggattaacagaagaggtgaaaagtctctataatgacgatgataaaacactgataaaagaaattgatgaggacaccaaaaaatggaaagatattccatgttcatggattggaagaaccaacattgttaaaatgtccatactacacaaagcaatctacagattcaatggaatccctatcaaaatacagacattcttcatagaaatagaaaaactatcccaaaatttatatggaaccacaaaagaccctgaatagtcaaagctatcctaagcaaaaagaacaaaactggaggaatcatattatctgactttaaattatatttcagagctatagtaaccaaaacggcatggtactggcataaaaacagacatatacaccaatggaatagaatagagaacccagaaacaaatctacacacttacagtgaactcatttttgacaaaggtgccaagaacatacactgggaaaaagacagtcttttcaataaatggtgcttggaaaactggatatccatacgcagaagaaagaaatgagacccctacctttcaccatatacaaaattcaaatcaaaatggattaaagacttaaatctaagaccccaaaccatgaaactactacaataaaacattagggaaactctccaggacattggcccaggcaaaaatttcttgagcaatatttcacaagcccaggtaaccaaagcaaacatagatgaatgggatcacatcaagtttttctgtacagcaaagaatacaatcaacaaagtgaaaaggcaatcaacagaatgagagaaaatattttaaaaccacccatatgatgagggattaatcatcagaatatataaggagctcaaataattctctaggaaaacatctaataacccaatcaaaacatgggcaaaagatttgaatagacatttctctaaagaaggcatacaaatggcaaacaagcatgtgaaaggtgctcaatgccactgatcatcagagaaatgcaaatcaaaactacaacgagatatcatgtcactccagttaaaaagccttatatctaaaagacaggcaataataaatgctggcaaagatatggagaaaagtgaaccctcgtacactgttagtgggaatgtaaattagtacaaccactacagagaacagtttggaggttcctcacaaaactaaaaatagagctaccatacaatccagcaatcccactgctgggtatgtactcaaaggaatggaaacattgtattgaagagatgtctgcactcccatgtttgctgtagctctgttcacaaaagccaagatctggaaaataacctaagtgtctgtaaacagatgaatggataaagaaaatgtggtacataaacacagtggaatactattcagccataaaaaagaatgaggttcagtcatttgcaacaacatgaatgcaactggagatcattatgttaagtgaaataagccaggcacagaaagacaaatatcacatgttctcacttatttgtgtgactgaaaaatcaaaacaattgaacccatggagatagagagtagaaggatggttgccagaggctgagaagagtagtagggggtttggggggaaggggggatggttaatgggtaaaaaaaaaaaaatagaatgaatgggacctggtgtttgatgacccaacaaggtgactatagtcaatagtaatttgtttgtacattttagaataactagaagagtataactggactgtttgtaacatgggagataagtgcttgaggggatggatgccccaatttttatggtgtggttgtcacacattgtatgcctgtgtcaaggcatctcatgtgccccataaatatatacacctgctgtgtactcacaaaaattaaaaattttaataaatgttgattgtcctatttaattattctcaactttccgattttatttcccatgtaacagtgttgttttaggagagttttacttgtacatttatttatttacttataactagcaagtatgaaggcaagagactctggcccagagcagctgtactttcctctaggtctgcatctccagatggctctctgccatgtcctggcaatggctcttgtagtttctgcatggccaaccaggctccaggtagccttcctggttctccctgctactcaggtacccctcccgcaggctggtccagtgctctgttcttcctctgtcacagtactcatcagtgtgggactcttcccttgactctatccagacccctgctttgttcagcactgattgtcatgcctagaacaaccgttagctcataagatgcactcaatactccccatgcagccatgagcaatgcctgactgtgggtggcagggctaagcaattattcctggatgtaggtccacagcaggagtcagcatgtcacatttggccaaggactttgggagaggataaattcttaaaaagttgctatgagctcaagttacattggtttttttgtttgtttttgtttcttaagtagcaggtgagataagacattccagagatagagtgttctttttttttttttttttttgaaatggagtctcactctgtggaccaggctggagtgcactggtgtgatcttggctcactgcaagctctgcctcccaggttcaagcaattctcctgcctcagcctcccgagtagctgggattacaggtgtgcaccaccacacctggctaatttttgtatttttttagtagagatggggtttcaccatgttggccaggctggtctcgaactccttctgacctcaggtgatctgcctgccttggcacctcaaagtgctgggattacaggtgtgagccacagcactcggcccaagatagagcattctctagagcagcagtctccaacatttttggcaccagtgactggttttgtggaagacaattttgccaccaggtcaagggtggggagggcggatggttttgggatgaaactgttccacctcagatcatcaggcattagttagattctcataaggagtgcaagttagatccctcacatgcgtagttcactggggttcacatcctatgagaatctaatgccaccgctgatctgacaggtggtagagctcaggcagtaatgctcgctggcctgcagctcacctcctactgtggcctggttcctaacaggccaccaaccggtactggtccatggcctgggggttggggacccctgctctagagcattctagagacgtctatatacttcgcattctgttactgaaagacattcaattagttcagtttcagagctctgccacagaaccaccttcagcgaagattcaagtgctgtaaatgaggctggatccagaaccaggtcccatggaaggaccatcatgggagtgggagtgggttcagaatctagctttcatatcaggagataagtgtgactcagcacactctggtctggatgcctctgctgatcacttccctagactatgtaagagcactctgtgcctcaatttccttatttggaaaatgaagagaataagcacacatacttcatggggttgcatgagaattaaaggaactagtatttcatgaagtccatagtgcctggcacacagtaagtgctacaaacaaacaacaaaagagcctgtggtcaccttctagtgcatcttaactctacccccagcacaggcttaacttcccaagaactgcagcgcttcccccagggcagaaagccgtcttcctcttgctccttcctctctacctccactcttagttgtgttccttgggacccagaatggttttccagttcttgacaagtcagagatacctcagtatccatttcctgtctcagattctgagcttccgagggtacagctactttgtaaatggctgcactcagtatataaatgttcattgaatgaatgaatacatgcatgaagcaaaggcggagcccacttaaaggaagcctgtggctttgtcattggtttcggaacttctcagccttccttttatcctccacttggatcctctgcctctgttccatgtccttgatttctagctccatggcaaaggagtcagttttctgtctgtccttcttgtctttcatttctctttcacccctgattattgtcctatggtccttaacttcacatcctgaagcctgaagactagtgtctccactcaactccttggctggccagggctctgggtgtcttgctaactggggcccttctcacctaggagtggtgcagtcccaagcgtgcaggctagagggcatcatctgttccgacaaggtcagtagtggcagaagcagcaccttctcacttgggccagaggttcagctttttcagaccagccgccctatgactggggagaaagaactcaagacttcacctcttcttcctcacctcctcaatggctccaaaatgtccctcacacctcactcaagaagagcaaggtgtaagtctagatgagatacccctgaggcagagtgcaggcagggtccttctgataccactaggtggctagaaatggtgtctaatgtgaaagttgttggatagtagaaatctcagtctctctgtaggaaaccagtgaatgaaaaagtactttgaaagccagagtttgagatcagcctgggcaaaatagcgagacaccacagctacaaaaataaaaaattagccaggcatggtggtgaatgcctgtagtcctagctactaaggaggctaagatgtgagagttgcttaaacccaggagtttgaggttacagtgagctatgactataccaccgcaccccagcctggatgacaaaacaagaccctgtctctatatgtctctctaaaaaaaaaaggtgctttgaatttgaaattagggaaacacatcagtaagcaagtcagttgacctattatgatggatgatgttggtctagattctgagtgggttaccaaaggaaaacagtcactgattcttagaacgtctcagagtgtagtttctcaagttcttgctcacagttcattgcaattccaccgtttttttcaactttcttcaatacctgctcctgaaccccgcccagcatccccgggtcaccatacctcaggtacaggaggtagaagtgctctctggcctcaggaattttgttccatttttctttactggaaggagtaagggttcttctgaccctgccacattctccatcctcaaagctcacaaacccattagtctgtcaatgggtttgtgacatactaacccttgctcaaaccagactttctctaagaaatctcagataccctccttgcccctcagaaggaatctcagtgcctttctcctctcctcacccaaatgcctattatgaacatagactgaattttttaggaatgtcctgataacaaaaatccttcccatcatcccctttatgtcgcctcatttttctcagactgtgtgtcacaactggggagttgtggtcaccatgcccacaggtattacagcaaagcctcttaaccttttgtgtgccatggattcctttggcatgccagtgaagcttatgaactcagaataatatttctaaatgcataaagtaaaagaaatagggttataaaggaaaccggtagtagtaaaatacagctatcaaaatgtggaaatgacaaataggtaatatatatgtgcttctttattaatgcattaatgcatgatctagcagtaggcctacaaactgctgacatttctaagtagtaatgaatataagtgatattttgagatacctgaaaccactgtaatgtgatacaaaaatatttgtgatttccatcagtggcaaagtcattggtactgctaatactattgtggtttgtatttgttgcttatccttataattgaagaaaatgctgaatttcaattagaggttagcaaaaaaaaaaaaaagacatagtgtcttctcatctaccttctcccaagttaagaactcctgcattagagggtctgttgctttcatgatgctatgaggtcccatggaggggggtcccaagagaccacatcttttccactttggtagcccttgggtcaatccagctcagtgctcacacatgggagactctctgtgcttgtttgtgaaattaaaaggaaaagaactggctgggtgtggtggctcatgcctgtaatcccaggactttgggaggctgaggcaggtggatcgcttgagcctaggagtttgagaccagcctgggcaacatggtcaaaccttgtctctactaaaaacacataaattagccaggcatggtggcatgcacctgtaatctcagctacttgggaggctgagtcatgagaattgcttaaacccaagaggtggaggttgcagtgagcagagatcacgccactgcactccagcctgggtgacagagtgagactcggtctcaaaaaataaattaataaaataaaatagaagggaaagaactggtacatccctactctctcaggtgaagaaactgttaagtcaagtccttgtctggatttttgttcccaactccaattccagaggaggaaataaatgcccagtgtctcttgctctgcaggcacggggcaggaggaattaaccaactttggggatccagctatgtcagaagaagtctcaggagaaagcctggaaacaagttgagctggttaaacagagcatgatgaaaaaacgcaggaaagggaaatgatgtcactcatgctggcagctttgaggacaaggaagcgaaaatgtacgcttctgatagtcaactaccccgcctatcccaccctgctgtctcccaggaaggtagctggaactgcaagtggggcaaagctcccagcactaccagccagtggcaagggccttcacctgcccaccttttgaactgaggtttttcctccagcagaaccgaaggcccatgtgcttccctgcaaagtgatgcaactgggcaggaagctcagatgccagcaactgtgatgtcctagatagggaaaaccctgcattgcaaactcaggtcttcctttggaaaaaaaggagtggctggatttccttcttgctgtctagaaaattgtttcctgcccaaaaatggcttaattaggaagctgagtttgtttcctaggaagggattctccttctcttccttctgcgcggcttacctttacaatgccactggcaccgattatagcctgactcccgggtttggaacctcactttctcaagctggcttgatgtgcccatgaaatgtacccctggcttctctaacacagttgcatcccccatctgttccactggagcactagcaaggtgccaagcacttgctgcccttgaagaccccatggttcatgcgcagctattcccacatctctcccccactataagagtcttcagtggccctatggccttaagggggaaaagtcaagaattacagaattaagaaagccaagtagaaaggggcttaataaatcatttcatttgttttcccataatttacagataaggaaaggaagttattttaccaagaccacacaatgaggtgaaggtaaagctagagctagaacttcagtttctagactcccagatcaaattcatattccttggtatggtattcttggtcactgatattatagccatatttccaatttgattctccatggcttctccccatgaaaccgagctccagccaaacaaatctatttgccagtcctcaagtaccttttgggtttttctgtcctctcatttctgttttgagtgtcctttgttcaacttcgccctcctctctatccctccctagcatctctgctcatttaaattctgcctacccttcaaggcttatctcaagctctgctatgtgatagtgccctcctctgtgccccttggcacttaactttctgcgcactcagcagtactgatcttggttctgcaaacgtacctcttatcctccaacaaggctgtaggcaggtagtggccagagacctgcccggggcatctctgtaatcctcacagcattcagcacagtgtcttgcacatagtaggcatttaataaatatctattgaaagaatggcttttaagatctatcagacacaaggatgataaaaatgatcttatgtgtctataggtttatataaatatgcatatatatatatataactcctgggtgaggcagacagacgatgtaggtgttatctccattttattaatgaaactgaatgcccgaaaggtgtaaaaactagacttgggtcacccaagttcaccctgaaagttggtaagaaagtgaatattaggattgggtctcctggctctcagtcccatgtgatcttcagtgctaataccctctacattgtttccactgaagactcatttcttctaccagaattatgagatgggaaaagcttccttctcagtctcatttttaagaaaagctatttactataggagtttctcatgcgttaagagtgtcatgtactggaatgaacacttactgaatacaactttggggtctgccttttaccagttgaatgaccttgggcaagttacttcacctctctgaactatggtttccccatgtatacaatgaaggaattagactcgtacttaaaaatcacttcttgctctaacagtccaggaggaatagtctatcattagataaggaaattcttgccattgaggtag

SEQ ID NO: 4 - DNA, 21 bp, Artificial Sequence
  P344-check1
cagcagactagggtgtgaatg

SEQ ID NO: 5 - DNA, 21 bp, Artificial Sequence
  P344-check2
actgccacactactgccagtg

SEQ ID NO: 6 - DNA, 21 bp, Artificial Sequence
  P344-check4
actataggagtttctcatgcg

SEQ ID NO: 7 - DNA, 21 bp, Artificial Sequence
  P344-check5
cacaaacctgagagctccttg

SEQ ID NO: 8 - DNA, 22 bp, Artificial Sequence
  P344-check6
taggacttggctcttggatggc

SEQ ID NO: 9 - DNA, 22 bp, Artificial Sequence
  P344-check7
tcctggctaacatggtgagacc

SEQ ID NO: 10 - DNA, 21 bp, Artificial Sequence
  GBPR61
ggcttccatgtcggcagaatg

SEQ ID NO: 11 - DNA, 25 bp, Artificial Sequence
  GBPR75
cgccttctatcgccttcttgacgag

SEQ ID NO: 12 - DNA, 22 bp, Artificial Sequence
  GBPR97
aaaatcactggatataccaccg

SEQ ID NO: 13 - DNA, 21 bp, Artificial Sequence
  GBPR101
ggacaggtcggtcttgacaaa

SEQ ID NO: 14 - DNA, 21 bp, Homo sapiens
tatatatatatatatatatac

SEQ ID NO: 15 - DNA, 17 bp, Homo sapiens
tcacacattcacacaca

SEQ ID NO: 16 - DNA, 19 bp, Homo sapiens
ttctctttctttccttcct

SEQ ID NO: 17 - DNA, 25 bp, Homo sapiens
  misc_feature (1)..(25): rs72314394
tttctctttctttccttcctttcct

SEQ ID NO: 18 - DNA, 21 bp, Homo sapiens
ctccttccttccttccttcct

SEQ ID NO: 19 - DNA, 31 bp, Homo sapiens
  misc_feature (1)..(31): rs138082438
ctcctttcctttcctttcctttccttccctt

SEQ ID NO: 20 - DNA, 23 bp, Homo sapiens
  misc_feature (1)..(23): rs138438672
cctttctttcccttcctttcttt

SEQ ID NO: 21 - DNA, 13 bp, Homo sapiens
  misc_feature (1)..(13): rs3980910
ttgtgtgtgtgtg

SEQ ID NO: 22 - DNA, 77 bp, Homo sapiens
tgttatatatacatatatatgtatatgttatatatacatatatatgtatatagttatatatacatatatatgtatat

SEQ ID NO: 23 - DNA, 156 bp, Homo sapiens
tagttatatatacatatatatgtatatgttatatatacatatatatgtatatagttatatatacatatatatgtatattgttatatatacatatatatgtatatgttatatatacatatatatgtatatagttatatatacatatatatgtatatt

SEQ ID NO: 24 - DNA, 11 bp, Homo sapiens
catactgaaga

SEQ ID NO: 25 - DNA, 10 bp, Homo sapiens
  misc_feature (1)..(10): rs71152496
gtttggtttt

SEQ ID NO: 26 - DNA, 39 bp, Homo sapiens
taaaattatatatatatatatatatatatatatataaaa

SEQ ID NO: 27 - DNA, 39 bp, Homo sapiens
  misc_feature (1)..(39): rs71570041
catatatatatatatatatatccatatatatatatatat

1. A system comprising:
a. a transgenic non-human animal comprising a transgene encoding a wildtype human protein, wherein the protein is biologically active in the animal; and
b. at least one transgenic non-human animal comprising a transgene encoding a variant human protein, wherein the protein is biologically active in the animal and wherein the variant comprises one or more single nucleotide polymorphisms (SNPs).

2. The system of claim 1, wherein the transgenic non-human animal is murine, bovine, ovine, porcine, avian or piscine.

3. The system of claim 1, wherein the human protein is a cytokine, cytokine receptor, TNF receptor, drug metabolizing enzyme, inflammatory protein or chromatin/DNA modifying protein.

4. The system of claim 1, wherein the transgene is a bacterial artificial chromosome (BAC) comprising a nucleotide sequence encoding the wildtype or variant human protein.

5. The system of claim 1, wherein the transgene encoding the wildtype or variant human protein comprises the non-coding regulatory regions of the human protein.

6. The system of claim 1, wherein the one or more SNPs are located in the promoter of the nucleotide sequence encoding the variant human protein.

7. A system comprising:
a. a transgenic mouse comprising a transgene encoding a wildtype human protein, wherein the protein is biologically active in the animal; and
b. at least one transgenic mouse comprising a transgene encoding a variant human protein, wherein the protein is biologically active in the mouse and wherein the variant comprises one or more SNPs.

8. The method of claim 7, wherein the human protein is a cytokine, cytokine receptor, TNF receptor, drug metabolizing enzyme, inflammatory protein or chromatin/DNA modifying protein.

9. The method of claim 7, wherein the human protein is interleukin-10 (IL-10).

10. The system of claim 7, wherein the transgene is a bacterial artificial chromosome (BAC) comprising a nucleotide sequence encoding the wildtype or variant human protein.

11. The system of claim 7, wherein the transgene encoding the wildtype or variant human protein comprises the non-coding regulatory regions of the human protein.

12. The system of claim 7, wherein the one or more SNPs are located in the promoter of the nucleotide sequence encoding the variant human protein.

13. A transgenic non-human animal comprising a transgene encoding a variant human interleukin-10 (IL-10), wherein human IL-10 is biologically active in the animal and wherein the variant comprises one or more SNPs.

14. The transgenic non-human animal of claim 13, wherein the animal is murine, bovine, ovine, porcine, avian or piscine.

15. The transgenic non-human animal of claim 13, wherein the transgene is a bacterial artificial chromosome (BAC) comprising a nucleotide sequence encoding a variant human IL-10.

16. The transgenic non-human animal of claim 13, wherein the one or more SNPs are located in the IL-10 promoter.

17. The transgenic non-human animal of claim 16, wherein the SNP is one or more of rs12569132, rs11809840, rs11809303, rs11808255, rs11802425, rs11802412, rs11799787, rs11585685, rs11579735, rs11119451, rs11119449, rs10494878, rs7556267, rs7548373, rs7537619, rs7519318, rs7512090, rs7418268, rs6692511, rs6682675, rs6673928, rs6668464, rs6668374, rs6540587, rs6540586, rs6540582, rs4844553, rs4844552, rs4579758, rs4483409, and rs11807715.

18. The transgenic non-human animal of claim 13, wherein the one or more SNPs are located in the IL-10 gene.

19. The transgenic non-human animal of claim 18, wherein the SNP is one or more of rs3024496, rs3024491, rs3024490, rs3021094, rs2222202, rs1800896, rs1800894, rs1800893, rs1800891, rs1800872, rs1800871, rs1554286, rs1518111, and rs1518110.

20. The transgenic non-human animal of claim 3, wherein the BAC further comprises a nucleotide sequence encoding mitogen activated protein kinase-activated protein kinase 2 (MK2).

21. The transgenic non-human animal of claim 3, wherein the BAC further comprises a nucleotide sequence encoding IL-19.

22. The transgenic non-human animal of claim 3, wherein the BAC further comprises a nucleotide sequence encoding IL-20.

23. A method for screening a candidate agent for the ability modulate IL-10 expression in the transgenic animal of claim 12 comprising the steps of:
a. administering to a first transgenic animal of claim 1 a candidate agent; and
b. comparing IL-10 expression in the first transgenic animal to IL-10 expression of a second transgenic animal of claim 1 not administered the candidate agent;
wherein a difference in the IL-10 expression in the first transgenic animal administered the candidate agent compared to the second transgenic animal not administered the candidate agent is indicative of a candidate agent that modulates IL-10 expression.

24. The method of claim 23, wherein the transgenic animal further comprises a disease model that is associated with IL-10.

25. The method of claim 24, wherein a difference in disease severity is also compared.

26. A system comprising (a) hIL10BAC-ATA mice and (b) hIL10BAC-GCC mice.

27. A transgenic non-human animal comprising a transgene encoding a human protein known to influence disease susceptibility, wherein the protein is biologically active in the animal.
